(19) United States
(12) Patent Application Publication
(10) Pub. No.: US 2005/0203025 A1
(43) Pub. Date: Sep. 15, 2005

(54) Compounds and methods for modulating nonclassical cadherin-mediated functions

(75) Inventors: Orest W. Blaschuk, Westmount (CA); Barbara J. Gour, Kemptville (CA); James Matthew Symonds, Durham, NC (US); Stephen Byers, Washington, DC (US)

Correspondence Address: SEED INTELLECTUAL PROPERTY LAW GROUP PLLC, 701 FIFTH AVE, SUITE 6300, SEATTLE, WA, 98104-7092, US

(73) Assignee: Adherex Technologies, Inc., Ottawa (CA)

(21) Appl. No.: 11/004,107

(22) Filed: Dec. 3, 2004

Related U.S. Application Data
(63) Continuation-in-part of application No. 10/759,379, filed on Jan. 16, 2004.
Application No. 10/759,379 is a continuation of application No. 09/305,928, filed on May 5, 1999, now Pat. No. 6,682,901.
Application No. 09/305,928 is a continuation-in-part of application No. 09/234,395, filed on Jan. 20, 1999, now Pat. No. 6,680,175.
Application No. 09/234,395 is a continuation-in-part of application No. 09/187,859, filed on Nov. 6, 1998, now Pat. No. 6,358,920.
Application No. 09/187,859 is a continuation-in-part of application No. 09/073,040, filed on May 5, 1998, now Pat. No. 6,472,367.
(63) Continuation-in-part of application No. 10/759,507, filed on Jan. 16, 2004.
Application No. 10/759,507 is a continuation of application No. 09/234,395, filed on Jan. 20, 1999, now Pat. No. 6,680,175.
Application No. 09/234,395 is a continuation-in-part of application No. 09/187,859, filed on Nov. 6, 1998, now Pat. No. 6,358,920.
Application No. 09/187,859 is a continuation-in-part of application No. 09/073,040, filed on May 5, 1998, now Pat. No. 6,472,367.
(63) Continuation-in-part of application No. 10/654,578, filed on Sep. 3, 2003.
Application No. 10/654,578 is a continuation of application No. 09/535,852, filed on Mar. 27, 2000, now Pat. No. 6,638,911.
Application No. 09/535,852 is a continuation-in-part of application No. 09/187,859, filed on Nov. 6, 1998, now Pat. No. 6,358,920.
Application No. 09/187,859 is a continuation-in-part of application No. 09/073,040, filed on May 5, 1998, now Pat. No. 6,472,367.
(63) Continuation-in-part of application No. 10/395,032, filed on Mar. 21, 2003.
Application No. 10/395,032 is a continuation of application No. 09/839,542, filed on Apr. 20, 2001, now Pat. No. 6,569,996.
Application No. 09/839,542 is a division of application No. 09/187,859, filed on Nov. 6, 1998, now Pat. No. 6,358,920.
Application No. 09/187,859 is a continuation-in-part of application No. 09/073,040, filed on May 5, 1998, now Pat. No. 6,472,367.
(63) Continuation-in-part of application No. 10/141,357, filed on May 7, 2002, now abandoned.
Application No. 10/141,357 is a continuation of application No. 09/305,927, filed on May 5, 1999, now Pat. No. 6,433,149.
Application No. 09/305,927 is a continuation-in-part of application No. 09/264,516, filed on Mar. 8, 1999, now Pat. No. 6,593,297.
Application No. 09/264,516 is a continuation-in-part of application No. 09/234,395, filed on Jan. 20, 1999, now Pat. No. 6,680,175.
Application No. 09/234,395 is a continuation-in-part of application No. 09/187,859, filed on Nov. 6, 1998, now Pat. No. 6,358,920.
Application No. 09/187,859 is a continuation-in-part of application No. 09/073,040, filed on May 5, 1998, now Pat. No. 6,472,367.
(63) Continuation-in-part of application No. 10/006,869, filed on Dec. 3, 2001.
Application No. 10/006,869 is a continuation of application No. 09/187,859, filed on Nov. 6, 1998, now Pat. No. 6,358,920.
Application No. 09/187,859 is a continuation-in-part of application No. 09/073,040, filed on May 5, 1998, now Pat. No. 6,472,367.

(51) Int. Cl. A61K 38/10; A61K 38/08

(52) U.S. Cl. 514/13; 514/17; 514/16; 514/15; 514/14

(57) ABSTRACT

Modulating agents for inhibiting or enhancing nonclassical cadherin mediated cell adhesion are provided. The modulating agents comprise one or more of: (a) a peptide sequence that is at least 50% identical to a nonclassical cadherin CAR sequence; (b) a non-peptide mimetic of a nonclassical cadherin CAR sequence; (c) a substance, such as an antibody or antigen-binding fragment thereof, that specifically binds a nonclassical cadherin CAR sequence; and/or (d) a polynucleotide encoding a polypeptide that comprises a nonclassical cadherin CAR sequence or analogue thereof. Methods for using such modulating agents for modulating nonclassical cadherin-mediated cell adhesion in a variety of contexts are also provided.

### STATEMENT REGARDING SEQUENCE LISTING SUBMITTED ON CD-ROM

[0001] The Sequence Listing associated with this application is provided on CD-ROM in lieu of a paper copy, and is hereby incorporated by reference into the specification. Three CD-ROMs are provided, containing identical copies of the sequence listing: CD-ROM No. 1 is labeled COPY 1, contains the file 407c 15.app.txt which is 1.61 MB and created on Dec. 3, 2004; CD-ROM No. 2 is labeled COPY 2, contains the file 407c15.app.txt which is 1.61 MB and created on Dec. 3, 2004; CD-ROM No. 3 is labeled CRF (Computer Readable Form), contains the file 407c15.app.txt which is 1.61 MB and created on Dec. 3, 2004.

### TECHNICAL FIELD

[0002] The present invention relates generally to methods for modulating nonclassical cadherin-mediated functions, and more particularly to the use of modulating agents derived from nonclassical cadherin cell adhesion recognition sequences for inhibiting or enhancing functions mediated by nonclassical cadherins.

### BACKGROUND OF THE INVENTION

[0003] Cadherins are a rapidly expanding superfamily of calcium-dependent cell adhesion molecules (CAMs) (for review, see Munro et al., In: Cell Adhesion and Invasion in Cancer Metastasis, P. Brodt, ed., pp. 17-34, RG Landes Co., Austin Tex., 1996). All cadherins appear to be membrane glycoproteins that generally promote cell adhesion through homophilic interactions (a cadherin on the surface of one cell binds to an identical cadherin on the surface of another cell), although cadherins also appear to be capable of forming heterotypic complexes with one another under certain circumstances and with lower affinity.

[0004] There are many different types of cadherins. The most extensively studied group of cadherins is known as the classical, or type I, cadherins. Classical cadherins have been shown to regulate epithelial, endothelial, neural and cancer cell adhesion, with different cadherins expressed on different cell types. All classical cadherins have a similar structure. As illustrated in FIG. 1A, classical cadherins are composed of five extracellular domains (EC1-EC5), a single hydrophobic domain (TM) that transverses the plasma membrane (PM), and two cytoplasmic domains (CP1 and CP2). The calcium binding motifs DXNDN (SEQ ID NO:1), DXD and LDRE (SEQ ID NO:2) are interspersed throughout the extracellular domains, and each 110 amino acid region that contains such motifs is considered a cadherin repeat. The first extracellular domain (EC1) contains the cell adhesion recognition (CAR) sequence, HAV (His-Ala-Val), along with flanking sequences on either side of the CAR sequence that play a role in conferring specificity. Synthetic peptides containing the HAV sequence and antibodies directed against such peptides have been shown to inhibit classical cadherin-dependent processes (Munro et al., supra; Blaschuk et al., J. Mol. Biol. 211:679-82, 1990; Blaschuk et al., Develop. Biol. 139:227-29, 1990; Alexander et al., J. Cell. Physiol. 156:610-18, 1993).

[0005] Cadherins that contain calcium binding motifs within extracellular domain cadherin repeats, but do not contain an HAV CAR sequence, are considered to be nonclassical cadherins (illustrated in FIGS. 1B to 1AA). To date, nine groups of nonclassical cadherins have been identified (types II-X). These cadherins are also membrane glycoproteins. Type II, or atypical, cadherins include OB-cadherin (cadherin-11; see Getsios et al., Developmental Dynamics 211:238-247, 1998; Simonneau et al., Cell Adhesion and Communication 3:115-130, 1995; Okazaki et al., J. Biological Chemistry 269:12092-12098, 1994), cadherin-5 (VE-cadherin; see Navarro et al., J. Cell Biology 140:1475-1484, 1998), cadherin-6 (K-cadherin; see Shimoyama et al., Cancer Research 55:2206-2211, 1995; Shimazui et al., Cancer Research 56:3234-3237, 1996; Inoue et al., Developmental Dynamics 211:338-351, 1998; Getsios et al., Developmental Dynamics 211:238-247, 1998), cadherin-7 (see Nakagawa et al., Development 121:1321-1332, 1995), cadherin-8 (see Suzuki et al., Cell Regulation 2:261-270, 1991), cadherin-12 (Br-cadherin; see Tanihara et al., Cell Adhesion and Communication 2:15-26, 1994), cadherin-14 (see Shibata et al., J. Biological Chemistry 272:5236-5240, 1997), cadherin-15 (M-cadherin; see Shimoyama et al., J. Biological Chemistry 273:10011-10018, 1998), and PB-cadherin (see Sugimoto et al., J. Biological Chemistry 271:11548-11556, 1996). For a general review of atypical cadherins, see Redies and Takeichi, Developmental Biology 180:413-423, 1996 and Suzuki et al., Cell Regulation 2:261-270, 1991.

[0006] Types III-X include LI-cadherin (type III; see Berndorff et al., J. Cell Biology 125:1353-1369, 1994), T-cadherin (type IV; see Ranscht, U.S. Pat. No. 5,585,351; Tkachuk et al., FEBS Lett. 421:208-212, 1998; Ranscht et al., Neuron 7:391-402, 1991; Sacristan et al., J. Neuroscience Research 34:664-680, 1993; Vestal and Ranscht, J. Cell Biology 119:451-461, 1992; Fredette and Ranscht, J. Neuroscience 14:7331-7346, 1994; Ranscht and Bronner-Fraser, Development 111:15-22, 1991), protocadherins (type V; e.g., protocadherins 42, 43 and 68; see Sano et al., EMBO J. 12:2249-2256, 1993; GenBank Accession Number AF029343), desmocollins (type VI; e.g., desmocollins 1, 2, 3 and 4; see King et al., Genomics 18:185-194, 1993; Parker et al., J. Biol. Chem. 266:10438-10445, 1991; King et al., J. Invest. Dermatol. 105:314-321, 1995; Kawamura et al., J. Biol. Chem. 269:26295-26302, 1994), desmogleins (type VII; e.g., desmogleins 1 and 2; see Wheeler et al., Proc. Natl. Acad. Sci. USA 88:4796-4800; Koch et al., Eur. J. Cell. Biol. 55:200-208, 1991), and cadherin-related neuronal receptors (type X; see Kohmura et al., Neuron 20:1137-1151, 1998). Such cadherins appear to play a role in diverse functions.

[0007] Desmosomal cadherins, for example, are present within desmosomes, the intercellular junctions that provide adhesion and membrane anchors for the intermediate filament cytoskeleton. These cadherins (e.g., desmogleins and desmocollins) play a role in desmosomal adhesion, which is critically important for normal tissue construction and epidermis structure. Desmogleins and desmocollins are involved in a number of autoimmune blistering disorders, such as pemphigus vulgaris, pemphigus foliaceus and intercellular IgA dermatosis, and have been shown to have reduced expression in some human carcinomas. (see Chidgey, Histol. Histopathol. 12:1159-1168, 1997).

[0008] Most studies of nonclassical cadherins have focused on atypical or type II cadherins. The structure of these cadherins is similar to that of the type I cadherins, but they do not contain the CAR sequence, HAV (FIG. 1B). Furthermore, functions mediated by the atypical cadherins may be diverse. OB-cadherin, which is also known as cadherin-11, is an atypical cadherin (Getsios et al., Developmental Dynamics 211:238-247, 1998; Okazaki et al., J. Biol. Chem. 269:12092-98, 1994; Suzuki et al., Cell Regulation 2:261-70, 1991; Munro et al., supra). This cadherin can promote cell adhesion through homophilic interactions. Recent studies have shown that OB-cadherin is not expressed by well-differentiated, poorly invasive cancer cells, whereas it is expressed by invasive cancer cells (et al., Cancer Res. 56:3234-37, 1996; Shibata et al., Cancer Letters 99:147-53, 1996). OB-cadherin levels are also high in stromal cells and osteoblasts (Shibata et al., Cancer Letters 99:147-53, 1996; Simonneau et al., Cell Adhes. Commun. 3:115-30, 1995; Matsuyoshi and Imamura, Biochem. Biophys. Res. Commun. 23:355-58, 1997; Okazaki et al., J. Biol. Chem. 269:12092-98, 1994). Collectively, these observations have led to the hypothesis that OB-cadherin may mediate the interaction between malignant tumor cells and other cell types, such as stromal cells and osteoblasts, thus facilitating tumor cell invasion and metastasis.

[0009] OB-cadherin is expressed in certain specific cell types. In some invasive cancer cells, OB-cadherin is not only found at sites of cell-cell contact, but also in lamellopodia-like projections which do not interact with other cells. These observations suggest that OB-cadherin may also play a role in modulating cell-substrate interactions. In adipocytes, OB-cadherin is the only known expressed cadherin. OB-cadherin is therefore likely to mediate adhesion between adipocytes, and it is likely to be an important regulator of adipogenesis. Another cell type that expresses OB-cadherin is the pericyte (also known as the peri-endothelial cell). Pericytes are contractile cells which are similar to smooth muscle cells. They encircle the endothelial cells of blood vessels. Pericytes are involved in maintaining the structural integrity of blood vessels (Hanahan, Science 277:48-50, 1997; Lindahl et al., Science 277:242-245, 1997). Loss of pericytes causes blood vessels to regress.

[0010] Other atypical cadherins appear to have different functions. For example, cadherin-5 (also referred to as VE-cadherin) appears to be involved in endothelial cell adhesion and cadherin-6 (also referred to as K-cadherin) may be involved in embryonic kidney cell adhesion and is up-regulated in kidney cancer. Cadherin-15 also appears to play a role in the terminal differentiation of muscle cells.

[0011] Notwithstanding these recent advances, nonclassical cadherin function remains poorly understood at the biological and molecular levels. Accordingly, there is a need in the art for identifying sequences involved in modulating nonclassical cadherin-dependent functions, such as cell adhesion, and for the development of methods employing such sequences to inhibit processes such as cancer cell adhesion, invasion and metastasis. The present invention fulfills these needs and further provides other related advantages.

### SUMMARY OF THE INVENTION

[0012] Briefly stated, this invention provides compositions and methods for modulating nonclassical cadherin-mediated functions, such as cancer cell adhesion, invasion, and metastasis. Within certain aspects, modulating agents capable of modulating (i.e., inhibiting or enhancing) one or more functions mediated by a nonclassical cadherin are provided. Such modulating agents generally: (a) comprise a peptide sequence that is at least 50% identical to a nonclassical cadherin CAR sequence; (b) modulate a function mediated by the nonclassical cadherin, such that the modulating agent: (i) detectably inhibits a function that is modulated by the nonclassical cadherin; or (ii) detectably enhances adhesion of cells that express the nonclassical cadherin; and (c) contain no more than 85, and preferably no more than 50, consecutive amino acid residues present within the nonclassical cadherin. Certain modulating agents comprise a nonclassical cadherin CAR sequence and are 3-16 amino acid residues in length.

[0013] For certain modulating agents as provided above, the nonclassical cadherin CAR sequence has the formula:

(SEQ ID NO:3)

Aaa-Phe-Baa-Ile/Leu/Val-Asp/Asn/Glu-Caa-Daa-Ser/
Thr/Asn-Gly

wherein Aaa, Baa, Caa and Daa are independently selected amino acid residues; Ile/Leu/Val is an amino acid that is selected from the group consisting of isoleucine, leucine and valine, Asp/Asn/Glu is an amino acid that is selected from the group consisting of aspartate, asparagine and glutamate; and Ser/Thr/Asn is an amino acid that is selected from the group consisting of serine, threonine or asparagine. For other modulating agents as described above, the nonclassical cadherin CAR sequence consists of at least three consecutive amino acid residues, and preferably at least five consecutive amino acid residues, of a nonclassical cadherin, wherein the consecutive amino acids are present within a region of the nonclassical cadherin having the formula recited above. Other modulating agents may comprise at least nine consecutive amino acid residues of a nonclassical cadherin, wherein the nine consecutive amino acid residues comprise a region having a formula as recited above.

[0014] Within certain specific embodiments, a modulating agent as described above is a peptide ranging in size from 3 to 50, preferably from 4 to 16, amino acid residues.

[0015] Within other embodiments, a modulating agent comprises a nonclassical cadherin CAR sequence that is present within a cyclic peptide. Such cyclic peptides may have the formula: [chemical structure]
wherein W is a tripeptide selected from the group consisting of EEY, DDK, EAQ, DAE, NEN, ESE, DSG, DEN, EPK, DAN, EEF, NDV, DET, DPK, DDT, DAN, DKF, DEL, DAD, NNK, DLV, NRD, DPS, NQK, NRN, NKD, EKD, ERD, DPV, DSV, DLY, DSN, DSS, DEK, NEK; RAL, YAL, YAT, FAT and YAS wherein X₁, and X₂ are optional, and if present, are independently selected from the group consisting of amino acid residues and combinations thereof in which the residues are linked by peptide bonds, and wherein X₁ and X₂ independently range in size from 0 to 10 residues, such that the sum of residues contained within X₁ and X₂ ranges from 1 to 12; wherein Y₁ and Y₂ are independently selected from the group consisting of amino acid residues, and wherein a covalent bond is formed between residues Y₁ and Y₂; and wherein Z₁ and Z₂ are optional, and if present, are independently selected from the group consisting of amino acid residues and combinations thereof in which the residues are linked by peptide bonds.

[0016] Within other aspects of the present invention, polynucleotides encoding a modulating agent as described above are provided, along with expression vectors comprising such a polynucleotide and host cells transformed or transfected with such an expression vector.

[0017] The present invention further provides modulating agents that comprise an antibody or antigen-binding fragment thereof that specifically binds to a nonclassical cadherin CAR sequence and modulates a nonclassical cadherin-mediated function, wherein the nonclassical cadherin CAR sequence has the formula:
Aaa-Phe-Baa-Ile/Leu/Val-Asp/Asn/Glu-Caa-Daa-Ser/Thr/Asn-Gly (SEQ ID NO:3)
wherein Aaa, Baa, Caa and Daa are independently selected amino acid residues; Ile/Leu/Val is an amino acid that is selected from the group consisting of isoleucine, leucine and valine, Asp/Asn/Glu is an amino acid that is selected from the group consisting of aspartate, asparagine and glutamate; and Ser/Thr/Asn is an amino acid that is selected from the group consisting of serine, threonine and asparagine; and wherein the modulating agent inhibits or enhances a function mediated by the nonclassical cadherin. Within specific embodiments, the nonclassical cadherin CAR sequence may be any of the sequences recited below.

[0018] Within further aspects, the present invention provides modulating agents comprising a non-peptide mimetic of any one of the nonclassical cadherin CAR sequences provided above.

[0019] Within certain specific embodiments, a modulating agent as provided herein may comprise: (a) one or more cadherin-6 CAR sequences selected from the group consisting of NEN, INEN (SEQ ID NO128), NENT (SEQ ID NO:129), IINEN (SEQ ID NO:130), INENT (SEQ ID NO:131), IINENT (SEQ ID NO:132), NENTG (SEQ ID NO:133), INENTG (SEQ ID NO:134), IINENTG (SEQ ID NO:135), FIINEN (SEQ ID NO:136), FIINENT (SEQ ID NO:137), FIINENTG (SEQ ID NO:138), LFIINEN (SEQ ID NO:139), LFIINENT (SEQ ID NO:140), LFIINENTG (SEQ ID NO:141), EEY, EEYT (SEQ ID NO:142), EEYTG (SEQ ID NO:143), LEEY (SEQ ID NO:144), LEEYT (SEQ ID NO:145), LEEYTG (SEQ ID NO:146), LLEEY (SEQ ID NO:147), LLEEYTG (SEQ ID NO:148), FLLEEY (SEQ ID NO:149), FLLEEYT (SEQ ID NO:150), FLLEEYTG (SEQ ID NO:151), FFLLEEY (SEQ ID NO:152), FFLLEEYT (SEQ ID NO:153), FFLLEEYTG (SEQ ID NO:154), ESE, ESET (SEQ ID NO:155), ESETG (SEQ ID NO:156), VESE (SEQ ID NO:157), VSEST (SEQ ID NO:158), VESETG (SEQ ID NO:159), SVESE (SEQ ID NO:160), SVESET (SEQ ID NO:161), SVESETG (SEQ ID NO:162), FSVESE (SEQ ID NO:163), FSVESET (SEQ ID NO:164), FSVESETG (SEQ ID NO:165), YFSVESE (SEQ ID NO:166), YFSVESET (SEQ ID NO:16.7), YFSVESETG (SEQ ID NO:168), DSG, DSGN (SEQ ID NO:169), DSGNG (SEQ ID NO:170), IDSG (SEQ ID NO:171), IDSGN (SEQ ID NO:172), IDSGNG (SEQ ID NO:173), NIDSG (SEQ ID NO:174), NIDSGN (SEQ ID NO:175), NIDSGNG (SEQ ID NO:176), FNIDSG (SEQ ID NO:177), FNIDSGN (SEQ ID NO:178), FNIDSGNG (SEQ ID NO:179), IFNIDSG (SEQ ID NO:180), IFNIDSGN (SEQ ID NO:181) and IFNIDSGNG (SEQ ID NO:182); or (b) an analogue of any of the foregoing sequences that differs in one or more substitutions, deletions, additions and/or insertions such that that ability of the analogue to modulate a cadherin-6-mediated function is not substantially diminished. For example, the agent may comprise a linear peptide having the sequence N-Ac-FFLLEEYTG-NH₂ (SEQ ID NO:154), N-Ac-LFIINENTG-NH₂ (SEQ ID NO:141), N-Ac-YFSVESETG-NH₂ (SEQ ID NO:168) or N-Ac-IFNIDSGNG-NH₂ (SEQ ID NO:187). The cadherin-6 CAR sequence may, but need not, be present within a cyclic peptide.

[0020] Within certain specific embodiments, a modulating agent as provided herein may comprise: (a) one or more cadherin-7 CAR sequences selected from the group consisting of DEN, IDEN (SEQ ID NO:183), DENT (SEQ ID NO:184), IIDEN (SEQ ID NO:185), IDENT (SEQ ID NO:186), IIDENT (SEQ ID NO:187), DENTG (SEQ ID NO:188), IDENTG (SEQ ID NO:189), IIDENTG (SEQ ID NO:190), FIIDEN (SEQ ID NO:191), FIIDENT (SEQ ID NO:192), FIIDENTG (SEQ ID NO:193), IFIIDEN (SEQ ID NO:194), IFIIDENT (SEQ ID NO:195), IFIIDENTG (SEQ ID NO:196), EPK, EPKT (SEQ ID NO:197), EPKTG (SEQ ID NO:198), VEPK (SEQ ID NO:199), VEPKT (SEQ ID NO:200), VEPKTG (SEQ ID NO:201), SVEPK (SEQ ID NO:202), SVEPKT (SEQ ID NO:203), SVEPKTG (SEQ ID NO:204), FSVEPK (SEQ ID NO:205), FSVEPKT (SEQ ID NO:206), FSVEPKTG (SEQ ID NO:207), YFSVEPK (SEQ ID NO:208), YFSVEPKT (SEQ ID NO:209), YFSVEPKTG (SEQ ID NO:210), DAN, DANS (SEQ ID NO:211), DANSG (SEQ ID NO:212), IDAN (SEQ ID NO:213), IDANS (SEQ ID NO:214), IDANSG (SEQ ID NO:215), NIDAN (SEQ ID NO:216), NIDANS (SEQ ID NO:217), NIDANSG (SEQ ID NO:218), FNIDAN (SEQ ID NO:219), FNIDANS (SEQ ID NO:220), FNIDANSG (SEQ ID NO:221), YFNIDAN (SEQ ID NO:222), YFNIDANS (SEQ ID NO:223) and YFNIDANSG (SEQ ID NO:224); or (b) an analogue of any of the foregoing sequences that differs in one or more substitutions, deletions, additions and/or insertions such that that ability of the analogue to modulate a cadherin-7-mediated function is not substantially diminished. For example, the agent may comprise a linear peptide having the sequence N-Ac-IFIIDENTG-NH₂ (SEQ ID NO:196), N-Ac-YFSVEPKTG-NH₂ (SEQ ID NO:210) or N-Ac-YFNIDANSG-NH₂ (SEQ ID NO:224). The cadherin-7 CAR sequence may, but need not, be present within a cyclic peptide.

[0021] Within certain specific embodiments, a modulating agent as provided herein may comprise: (a) one or more cadherin-8 CAR sequences selected from the group consisting of NDV, INDV (SEQ ID NO:225), NDVT (SEQ ID NO:226), QINDV (SEQ ID NO:227), INDVT (SEQ ID NO:228), QINDVT (SEQ ID NO:229), NDVTG (SEQ ID NO:230), INDVTG (SEQ ID NO:231), QINDVTG (SEQ ID NO:232), FQINDV (SEQ ID NO:233), FQINDVT (SEQ ID NO:234), FQINDVTG (SEQ ID NO:235), IFQINDV (SEQ ID NO:236), IFQINDVT (SEQ ID NO:237), IFQINDVTG (SEQ ID NO:238), EEF, EEFS (SEQ ID NO:239), EEFSG (SEQ ID NO:240), LEEF (SEQ ID NO:241), LEEFS (SEQ ID NO:242), LEEFSG (SEQ ID NO:243), VLEEF (SEQ ID NO:244), VLEEFS (SEQ ID NO:245), VLEEFSG (SEQ ID NO:247), FVLEEF (SEQ ID NO:247), FVLEEFS (SEQ ID NO:248), FVLEEFSG (SEQ ID NO:249), MFVLEEF (SEQ ID NO:250), MFVLEEFS (SEQ ID NO:251) and MFVLEEFSG (SEQ ID NO:252); or (b) an analogue of any of the foregoing sequences that differs in one or more substitutions, deletions, additions and/or insertions such that that ability of the analogue to modulate a cadherin-8-mediated function is not substantially diminished. For example, the agent may comprise a linear peptide having the sequence N-Ac-MFVLEEFSG-NH₂ (SEQ ID NO:252) or N-Ac-IFQINDVTG-NH₂ (SEQ ID NO:238). The cadherin-8 CAR sequence may, but need not, be present within a cyclic peptide.

[0022] Within certain specific embodiments, a modulating agent as provided herein may comprise: (a) one or more cadherin-12 CAR sequences selected from the group consisting of DET, IDET (SEQ ID NO:253), DETT (SEQ ID NO:254), TIDET (SEQ ID NO:255), IDETT (SEQ ID NO:256), TIDETT (SEQ ID NO:257), DETTG (SEQ ID NO:258), IDETTG (SEQ ID NO:259), TIDETTG (SEQ ID NO:260), FTIDET (SEQ ID NO:261), FTIDETT (SEQ ID NO:262), FTIDETTG (SEQ ID NO:263), VFTIDET (SEQ ID NO:264), VFTIDETT (SEQ ID NO:265), VFTIDETTG (SEQ ID NO:266), DPK, DPKT (SEQ ID NO:267), DPKTG (SEQ ID NO:268), IDPK (SEQ ID NO:269), IDPKT (SEQ ID NO:270), IDPKTG (SEQ ID NO:271), SIDPK (SEQ ID NO:272), SIDPKT (SEQ ID NO:273), SIDPKTG (SEQ ID NO:274), FSIDPK (SEQ ID NO:275), FSIDPKT (SEQ ID NO:276), FSIDPKTG (SEQ ID NO:277), YFSIDPK (SEQ ID NO:278), YFSIDPKT (SEQ ID NO:279) and YFSIDPKTG (SEQ ID NO:280); or (b) an analogue of any of the foregoing sequences that differs in one or more substitutions, deletions, additions and/or insertions such that that ability of the analogue to modulate a cadherin-12-mediated function is not substantially diminished. For example, the agent may comprise a linear peptide having the sequence N-Ac-VFTIDETTG-NH₂ (SEQ ID NO:266) or N-Ac-YFSIDPKTG-NH₂ (SEQ ID NO:280). The cadherin-12 CAR sequence may, but need not, be present within a cyclic peptide.

[0023] Within certain specific embodiments, a modulating agent as provided herein may comprise: (a) one or more cadherin-14 CAR sequences selected from the group consisting of DDT, IDDT (SEQ ID NO:281), DDTT (SEQ ID NO:282), IIDDT (SEQ ID NO:283), IDDTT (SEQ ID NO:284), IIDDTT (SEQ ID NO:285), DDTTG (SEQ ID NO:286), IDDTTG (SEQ ID NO:287), IIDDTTG (SEQ ID NO:288), FIIDDT (SEQ ID NO:289), FIIDDTT (SEQ ID NO:290), FIIDDTTG (SEQ ID NO:291), IFIIDDT (SEQ ID NO:292), IFIIDDTT (SEQ ID NO:293), IFIIDDTTG (SEQ ID NO:294), DPK, DPKT (SEQ ID NO:295), DPKTG (SEQ ID NO:296), VDPK (SEQ ID NO:297), VDPKT (SEQ ID NO:298), VDPKTG (SEQ ID NO:299), SVDPK (SEQ ID NO:300), SVDPKT (SEQ ID NO:301), SVDPKTG (SEQ ID NO:302), FSVDPK (SEQ ID NO:303), FSVDPKT (SEQ ID NO:304), FSVDPKTG (SEQ ID NO:305), YFSVDPK (SEQ ID NO:306), YFSVDPKT (SEQ ID NO:307), YFSVDPKTG (SEQ ID NO:308), DAN, DANT (SEQ ID NO:309), DANTG (SEQ ID NO:310), IDANT (SEQ ID NO:311), IDANTG (SEQ ID NO:312), NIDANT (SEQ ID NO:313), NIDANTG (SEQ ID NO:314), FNIDANT (SEQ ID NO:315), FNIDANTG (SEQ ID NO:316), FFNIDAN (SEQ ID NO:317), FFNIDANT (SEQ ID NO:318) and FFNIDANTG (SEQ ID NO:319); or (b) an analogue of any of the foregoing sequences that differs in one or more substitutions, deletions, additions and/or insertions such that that ability of the analogue to modulate a cadherin-14-mediated function is not substantially diminished. For example, the agent may comprise a linear peptide having the sequence N-Ac-IFIIDDTTG-NH₂ (SEQ ID NO:294), N-Ac-YFSVDPKTG-NH₂ (SEQ ID NO:308) or N-Ac-FFNIDANTG-NH₂ (SEQ ID NO:319). The cadherin-14 CAR sequence may, but need not, be present within a cyclic peptide.

[0024] Within certain specific embodiments, a modulating agent as provided herein may comprise: (a) one or more cadherin-15 CAR sequences selected from the group consisting of DKF, IDKF (SEQ ID NO:320), DKFT (SEQ ID NO:321), SIDKF (SEQ ID NO:322), IDKFT (SEQ ID NO:323), SIDKFT (SEQ ID NO:324), DKFTG (SEQ ID NO:325), IDKFTG (SEQ ID NO:326), SIDKFTG (SEQ ID NO:327), FSIDKF (SEQ ID NO:328), FSIDKFT (SEQ ID NO:329), FSIDKFTG (SEQ ID NO:330), VFSIDKF (SEQ ID NO:331), VFSIDKFT (SEQ ID NO:332), VFSIDKFTG (SEQ ID NO:333), DEL, DELT (SEQ ID NO:334), DELTG (SEQ ID NO:335), IDEL (SEQ ID NO:336), IDELT (SEQ ID NO:337), IDELTG (SEQ ID NO:338), SIDEL (SEQ ID NO:339), SIDELT (SEQ ID NO:340), SIDELTG (SEQ ID NO:341), FSIDEL (SEQ ID NO:342), FSIDELT (SEQ ID NO:343), FSIDELTG (SEQ ID NO:344), LFSIDEL (SEQ ID NO:345), LFSIDELT (SEQ ID NO:346) and LFSIDELTG (SEQ ID NO:347); or (b) an analogue of any of the foregoing sequences that differs in one or more substitutions, deletions, additions and/or insertions such that that ability of the analogue to modulate a cadherin-15-mediated function is not substantially diminished. For example, the agent may comprise a linear peptide having the sequence N-Ac-VFSIDKFTG-NH₂ (SEQ ID NO:333) or N-Ac-LFSIDELTG-NH₂ (SEQ ID NO:347). The cadherin-15 CAR sequence may, but need not, be present within a cyclic peptide.

[0025] Within certain specific embodiments, a modulating agent as provided herein may comprise: (a) one or more T-cadherin CAR sequences selected from the group consisting of NEN, INEN (SEQ ID NO:348), NENT (SEQ ID NO:349), RINEN (SEQ ID NO:350), INENT (SEQ ID NO:351), RINENT (SEQ ID NO:352), NENTG (SEQ ID NO:353), INENTG (SEQ ID NO:354), RINENTG (SEQ ID NO:355), FRINEN (SEQ ID NO:356), FRINENT (SEQ ID NO:357), FRINENTG (SEQ ID NO:358), IFRINEN (SEQ ID NO:359), IFRINENT (SEQ ID NO:360) and IFRINENTG (SEQ ID NO:361); or (b) an analogue of any of the foregoing sequences that differs in one or more substitutions, deletions, additions and/or insertions such that that ability of the analogue to modulate a T-cadherin-mediated function is not substantially diminished. For example, the agent may comprise a linear peptide having the sequence N-Ac-IFRINENTG-NH₂ (SEQ ID NO:361). The T-cadherin CAR sequence may, but need not, be present within a cyclic peptide.

[0026] Within certain specific embodiments, a modulating agent as provided herein may comprise: (a) one or more PB-cadherin CAR sequences selected from the group consisting of EEY, EEYT (SEQ ID NO:362), EEYTG (SEQ ID NO:363), VEEY (SEQ ID NO:364), VEEYT (SEQ ID NO:365), VEEYTG (SEQ ID NO:366), VVEEY (SEQ ID NO:367), VVEEYT (SEQ ID NO:368), VVEEYTG (SEQ ID NO:369), FVVEEY (SEQ ID NO:370), FVEEYT (SEQ ID NO:371), FVEEYTG (SEQ ID NO:372), FFVVEEY (SEQ ID NO:373), FFVVEEYT (SEQ ID NO:374), FFVVEEYTG (SEQ ID NO:375), DEL, DELT (SEQ ID NO:376), DELTG (SEQ ID NO:377), IDEL (SEQ ID NO:378), IDELT (SEQ ID NO:379), IDELTG (SEQ ID NO:380), LIDEL (SEQ ID NO:381), LIDELT (SEQ ID NO:382), LIDELTG (SEQ ID NO:383), FLIDEL (SEQ ID NO:384), FLIDELT (SEQ ID NO:385), FLIDELTG (SEQ ID NO:386), IFLIDEL (SEQ ID NO:387), IFLIDELT (SEQ ID NO:388), IFLIDELTG (SEQ ID NO:389), DPK, DPKT (SEQ ID NO:390), DPKTG (SEQ ID NO:391), VDPK (SEQ ID NO:392), VDPKT (SEQ ID NO:393), VDPKTG (SEQ ID NO:394), TVDPK (SEQ ID NO:395), TVDPKT (SEQ ID NO:396), TVDPKTG (SEQ ID NO:397), FTVDPK (SEQ ID NO:398), FTVDPKT (SEQ ID NO:399), FTVDPKTG (SEQ ID NO:400), HFTVDPK (SEQ ID NO:401), HFTVDPKT (SEQ ID NO:402), HFTVDPKTG (SEQ ID NO:403), DAD, DADT (SEQ ID NO:404), DADTG (SEQ ID NO:405), IDAD (SEQ ID NO:406), IDADT (SEQ ID NO:407), IDADTG (SEQ ID NO:408), DIDAD (SEQ ID NO:409), DIDADT (SEQ ID NO:410), DIDADTG (SEQ ID NO:411), FDIDAD (SEQ ID NO:412), FDIDADT (SEQ ID NO:413), FDIDADTG (SEQ ID NO:414), IFDIDAD (SEQ ID NO:415), IFDIDADT (SEQ ID NO:416) and IFDIDADTG (SEQ ID NO:417); or (b) an analogue of any of the foregoing sequences that differs in one or more substitutions, deletions, additions and/or insertions such that that ability of the analogue to modulate a PB-cadherin-mediated function is not substantially diminished. For example, the agent may comprise a linear peptide having the sequence N-Ac-FFVVEEYTG-NH₂ (SEQ ID NO:375), N-Ac-IFLIDELTG-NH₂ (SEQ ID NO:389), N-Ac-HFTVDPKTG-NH₂ (SEQ ID NO:403) or N-Ac-IFDIDADTG-NH₂ (SEQ ID NO:417). The PB-cadherin CAR sequence may, but need not, be present within a cyclic peptide.

[0027] Within certain specific embodiments, a modulating agent as provided herein may comprise: (a) one or more LI-cadherin CAR sequences selected from the group consisting of NNK, NNKT (SEQ ID NO:418), NNKTG (SEQ ID NO:419), INNK (SEQ ID NO:420), INNKT (SEQ ID NO:421), INNKTG (SEQ ID NO:422), QINNK (SEQ ID NO:423), QINNKT (SEQ ID NO:424), QINNKTG (SEQ ID NO:425), FQINNK (SEQ ID NO:426), FQINNKT (SEQ ID NO:427), FQINNKTG (SEQ ID NO:428), YFQINNK (SEQ ID NO:429), YFQINNKT (SEQ ID NO:430) and YFQINNKTG (SEQ ID NO:431); or (b) an analogue of any of the foregoing sequences that differs in one or more substitutions, deletions, additions and/or insertions such that that ability of the analogue to modulate a LI-cadherin-mediated function is not substantially diminished. For example, the agent may comprise a linear peptide having the sequence N-Ac-YFQINNKTG-NH₂ (SEQ ID NO:431). The LI-cadherin CAR sequence may, but need not, be present within a cyclic peptide.

[0028] Within certain specific embodiments, a modulating agent as provided herein may comprise: (a) one or more protocadherin CAR sequences selected from the group consisting of DLV, DLVT (SEQ ID NO:432), DLVTG (SEQ ID NO:433), LDLV (SEQ ID NO:434), LDLVT (SEQ ID NO:435), LDLVTG (SEQ ID NO:436), ALDLV (SEQ ID NO:437), ALDLVT (SEQ ID NO:438), ALDLVTG (SEQ ID NO:439), FALDLV (SEQ ID NO:440), FALDLVT (SEQ ID NO:441), FALDLVTG (SEQ ID NO:442), LFALDLV (SEQ ID NO:443), LFALDLVT (SEQ ID NO:444), LFALDLVTG (SEQ ID NO:445), NRD, NRDN (SEQ ID NO:446), NRDNG (SEQ ID NO:447), INRD (SEQ ID NO:448), INRDN (SEQ ID NO:449), INRDNG (SEQ ID NO:450), TINRD (SEQ ID NO:451), TINRDN (SEQ ID NO:452), TINRDNG (SEQ ID NO:453), FTINRD (SEQ ID NO:454), FTINRDN (SEQ ID NO:455), FTINRDNG (SEQ ID NO:456), YFTINRD (SEQ ID NO:457), YFTINRDN (SEQ ID NO:458), YFTINRDNG (SEQ ID NO:459), DPK, DPKT (SEQ ID NO:460), DPKTG (SEQ ID NO:461), IDPK (SEQ ID NO:462), IDPKT (SEQ ID NO:463), IDPKTG (SEQ ID NO:464), SIDPK (SEQ ID NO:465), SIDPKT (SEQ ID NO:466), SIDPKTG (SEQ ID NO:467), FSIDPK (SEQ ID NO:468), FSIDPKT (SEQ ID NO:469), FSIDPKTG (SEQ ID NO:470), LFSIDPK (SEQ ID NO:471), LFSIDPKT (SEQ ID NO:472), LFSIDPKTG (SEQ ID NO:473), DPS, DPSS (SEQ ID NO:474), DPSSG (SEQ ID NO:475), IDPS (SEQ ID NO:476), IDPSS (SEQ ID NO:477), IDPSSG (SEQ ID NO:478), EIDPS (SEQ ID NO:479), EIDPSS (SEQ ID NO:480), EIDPSSG (SEQ ID NO:481), FEIDPS (SEQ ID NO:482), FEIDPSS (SEQ ID NO:483), FEIDPS (SEQ ID NO:484), FEIDPSS (SEQ ID NO:485), FEIDPSSG (SEQ ID NO:486), LFEIDPS (SEQ ID NO:487), LFEIDPSS (SEQ ID NO:488) and LFEIDPSSG (SEQ ID NO:489); or (b) an analogue of any of the foregoing sequences that differs in one or more substitutions, deletions, additions and/or insertions such that that ability of the analogue to modulate a protocadherin-mediated function is not substantially diminished. For example, the agent may comprise a linear peptide having the sequence N-Ac-LFALDLVTG-NH₂ (SEQ ID NO:445), N-Ac-YFTINRDNG-NH₂ (SEQ ID NO:459), N-Ac-LFSIDPKTG-NH₂ (SEQ ID NO:473) or N-Ac-LFEIDPSSG-NH₂ (SEQ ID NO:489). The protocadherin CAR sequence may, but need not, be present within a cyclic peptide.

[0029] Within certain specific embodiments, a modulating agent as provided herein comprises: (a) one or more desmoglein CAR sequences selected from the group consisting of NQK, NQKT (SEQ ID NO:490), NQKTG (SEQ ID NO:491), INQK (SEQ ID NO:492), INQKT (SEQ ID NO:493), INQKTG (SEQ ID NO:494), VINQK (SEQ ID NO:495), VINQKT (SEQ ID NO:496), VINQKTG (SEQ ID NO:497), FVINQK (SEQ ID NO:498), FVINQKT (SEQ ID NO:499), FVINQKTG (SEQ ID NO:500), IFVINQK (SEQ ID NO:501), IFVINQKT (SEQ ID NO:502), IFVINQKTG (SEQ ID NO:503), NRN, NRNT (SEQ ID NO:504), NRNTG (SEQ ID NO:505), INRN (SEQ ID NO:506), INRNT (SEQ ID NO:507), INRNTG (SEQ ID NO:508), IINRN (SEQ ID NO:509), IINRNT (SEQ ID NO:510), IINRNTG (SEQ ID NO:511), FIINRN (SEQ ID NO:512), FIINRNT (SEQ ID NO:513), FIINRNTG (SEQ ID NO:514), MFIINRN (SEQ ID NO:515), MFIINRNT (SEQ ID NO:516), MFIINRNTG (SEQ ID NO:517), NKD, NKDT (SEQ ID NO:518), NKDTG (SEQ ID NO:519), LNKD (SEQ ID NO:520), LNKDT (SEQ ID NO:521), LNKDTG (SEQ ID NO:522), YLNKD (SEQ ID NO:523), YLNKDT (SEQ ID NO:524), YLNKDTG (SEQ ID NO:525), FYLNKD (SEQ ID NO:526), FYLNKDT (SEQ ID NO:527), FYLNKDTG (SEQ ID NO:528), VFYLNKD (SEQ ID NO:529), VFYLNKDT (SEQ ID NO:530) and VFYLNKDTG (SEQ ID NO:531); or (b) an analogue of any of the foregoing sequences that differs in one or more substitutions, deletions, additions and/or insertions such that that ability of the analogue to modulate a desmoglein-mediated function is not substantially diminished. For example, the agent may comprise a linear peptide having the sequence N-Ac-IFVINQKTG-NH₂ (SEQ ID NO:503), N-Ac-MFIINRNTG-NH₂ (SEQ ID NO:517) or N-Ac-VFYLNKDTG-NH₂ (SEQ ID NO:531). The desmoglein CAR sequence may, but need not, be present within a cyclic peptide.

[0030] Within certain specific embodiments, a modulating agent as provided herein may comprise: (a) one or more desmocollin CAR sequences selected from the group consisting of EKD, EKDT (SEQ ID NO:532), EKDTG (SEQ ID NO:533), IEKD (SEQ ID NO:534), IEKDT (SEQ ID NO:535), IEKDTG (SEQ ID NO:536), YIEKD (SEQ ID NO:537), YIEKDT (SEQ ID NO:538), YIEKDTG (SEQ ID NO:539), FYIEKD (SEQ ID NO:540), FYIEKDT (SEQ ID NO:541), FYIEKDTG (SEQ ID NO:542), LFYIEKD (SEQ ID NO:543), LFYIEKDT (SEQ ID NO:544), LFYIEKDTG (SEQ ID NO:545), ERD, ERDT (SEQ ID NO:546), ERDTG (SEQ ID NO:547), VERD (SEQ ID NO:548), VERDT (SEQ ID NO:549), VERDTG (SEQ ID NO:550), YVERD (SEQ ID NO:551), YVERDT (SEQ ID NO:552), YVERDTG (SEQ ID NO:553), FYVERD (SEQ ID NO:554), FYVERDT (SEQ ID NO:555), FYVERDTG (SEQ ID NO:556), LFYVERD (SEQ ID NO:557), LFYVERDT (SEQ ID NO:558), LFYVERDTG (SEQ ID NO:559), IERD (SEQ ID NO:560), IERDT (SEQ ID NO:561), IERDTG (SEQ ID NO:562), YIERD (SEQ ID NO:563), YIERDT (SEQ ID NO:564), YIERDTG (SEQ ID NO:565), FYIERD (SEQ ID NO:566), FYIERDT (SEQ ID NO:567), FYIERDTG (SEQ ID NO:568), LFYIERD (SEQ ID NO:569), LFYIERDT (SEQ ID NO:570) and LFYIERDTG (SEQ ID NO:571); or (b) an analogue of any of the foregoing sequences that differs in one or more substitutions, deletions, additions and/or insertions such that that ability of the analogue to modulate a desmocollin-mediated function is not substantially diminished. For example, the agent may comprise a linear peptide having the sequence N-Ac-LFYIEKDTG-NH₂ (SEQ ID NO:545), N-Ac-LFYVERDTG-NH₂ (SEQ ID NO:559) or N-Ac-LFYIERDTG-NH₂ (SEQ ID NO:571). The desmocollin CAR sequence may, but need not, be present within a cyclic peptide.

[0031] Certain illustrative desmosomal modulating agents comprise a desmoglein-1, desmoglein-2, desmoglein-3, desmocollin-1, desmocollin-2, desmocollin-3 or desmocollin-4 CAR sequence, or an analogue of any of the foregoing CAR sequences.

[0032] Within other specific embodiments, a modulating agent as provided herein may comprise: (a) one or more Desmoglein-1 CAR sequences selected from the group consisting of: RAL, RALN (SEQ ID NO: 4053), RALNS (SEQ ID NO: 4054, RALNSM (SEQ ID NO: 4055), RALNSL (SEQ ID NO: 4056), RALNSMG (SEQ ID NO: 4057), RALNSLG (SEQ ID NO: 4058), CRAL (SEQ ID NO: 4059), CRALN (SEQ ID NO: 4060), CRALNS (SEQ ID NO: 4061), CRALNSM (SEQ ID NO:160 4062), CRALNSL (SEQ ID NO:161 4063), CRALNSMG (SEQ ID NO: 4064), CRALNSLG (SEQ ID NO: 4065), YCRAL (SEQ ID NO: 4066), YCRALN (SEQ ID NO: 4067), YCRALNS (SEQ ID NO: 4068), YCRALNSM (SEQ ID NO: 4069), YCRALNSL (SEQ ID NO: 4070), YCRALNSMG (SEQ ID NO: 4071), YCRALNSLG (SEQ ID NO: 4072), IYRAL (SEQ ID NO: 4073), IYRALN (SEQ ID NO: 4074), IYRALNS (SEQ ID NO: 4075), IYRALNSM (SEQ ID NO: 4076), IYRALNSL (SEQ ID NO: 4077), IYRALNSMG (SEQ ID NO: 4078) or IYRALNSLG (SEQ ID NO: 4079); or (b) an analogue of any of the foregoing sequences that differs in one or more substitutions, deletions, additions and/or insertions such that that ability of the analogue to modulate a desmoglein-mediated function is not substantially diminished. Linear peptides having such sequences may be modified at the N- and/or C-termini, as in the peptides N-Ac-IYRALNSMG-NH₂ (SEQ ID NO: 4080) and N-Ac-IYRALNSLG-NH₂ (SEQ ID NO: 4081).

[0033] Within other specific embodiments, a modulating agent as provided herein may comprise: (a) one or more Desmoglein-2 CAR sequences selected from the group consisting of: YAL, YALD (SEQ ID NO: 4082), YALDA (SEQ ID NO: 4083), YALDAR (SEQ ID NO: 4084), YALDARG (SEQ ID NO: 4085), GYAL (SEQ ID NO: 4086), GYALD (SEQ ID NO: 4087), GYALDA (SEQ ID NO: 4088), GYALDAR (SEQ ID NO: 4089), GYALDARG (SEQ ID NO: 4090), TGYAL (SEQ ID NO: 4091), TGYALD (SEQ ID NO: 4092), TGYALDA (SEQ ID NO: 4093), TGYALDAR (SEQ ID NO: 4094), TGYALDARG (SEQ ID NO: 4095), LTGYAL (SEQ ID NO: 4096), LTGYALD (SEQ ID NO: 4097), LTGYALDA (SEQ ID NO: 4098), LTGYALDAR (SEQ ID NO: 4099) or LTGYALDARG (SEQ ID NO: 4100); or (b) an analogue of any of the foregoing sequences that differs in one or more substitutions, deletions, additions and/or insertions such that that ability of the analogue to modulate a desmoglein-mediated function is not substantially diminished. Linear peptides having such sequences may be modified at the N- and/or C-termini, as in the peptides N-Ac-LTGYALDARG-NH₂ (SEQ ID NO: 4101).

[0034] Within other specific embodiments, a modulating agent as provided herein may comprise: (a) one or more Desmoglein-3 CAR sequences selected from the group consisting of: RAL, RALN (SEQ ID NO: 4053), RALNA (SEQ ID NO:200 4102), RALNAQ (SEQ ID NO: 4103), RALNAL (SEQ ID NO: 4104), RALNAQG (SEQ ID NO: 4105), RALNALG (SEQ ID NO: 4106), CRAL (SEQ ID NO: 4107), CRALN (SEQ ID NO: 4108), CRALNA (SEQ ID NO: 4109), CRALNAQ (SEQ ID NO: 4110), CRALNAL (SEQ ID NO: 4111), CRALNAQG (SEQ ID NO: 4112), CRALNALG (SEQ ID NO: 4113), TCRAL (SEQ ID NO: 4114), TCRALN (SEQ ID NO: 4115), TCRALNA (SEQ ID NO: 4116), TCRALNAQ (SEQ ID NO: 4117), TCRALNAL (SEQ ID NO: 4118), TCRALNAQG (SEQ ID NO: 4119), TCRALNALG (SEQ ID NO: 4120), ITCRAL (SEQ ID NO: 4121), ITCRALN (SEQ ID NO: 4122), ITCRALNA (SEQ ID NO: 4123), ITCRALNAQ (SEQ ID NO: 4124), ITCRALNAL (SEQ ID NO: 4125), ITCRALNAQG (SEQ ID NO: 4126), ITCRALNALG (SEQ ID NO: 4127); or (b) an analogue of any of the foregoing sequences that differs in one or more substitutions, deletions, additions and/or insertions such that that ability of the analogue to modulate a desmoglein-mediated function is not substantially diminished. Linear peptides having such sequences may be modified at the N- and/or C-termini, as in the peptides N-Ac-ITCRALNAQG-NH₂ (SEQ ID NO: 4128) and N-Ac-ITCRALNALG-NH₂ (SEQ ID NO: 4129).

[0035] Within other specific embodiments, a modulating agent as provided herein may comprise: (a) one or more Desmocollin-1 CAR sequences selected from the group consisting of: YAT, YATT (SEQ ID NO: 4130), YATTA (SEQ ID NO: 4131), YATTAD (SEQ ID NO: 4132), YATTADG (SEQ ID NO: 4133), GYAT (SEQ ID NO: 4134), GYATT (SEQ ID NO: 4135), GYATTA (SEQ ID NO: 4136), GYATTAD (SEQ ID NO: 4137), GYATTADG (SEQ ID NO: 4138), AYAT (SEQ ID NO: 4139), AYATT (SEQ ID NO: 4140), AYATTA (SEQ ID NO: 4141), AYATTAD (SEQ ID NO: 4142), AYATTADG (SEQ ID NO: 4143), YGYAT (SEQ ID NO: 4144), YGYATT (SEQ ID NO: 4145), YGYATTA (SEQ ID NO: 4146), YGYATTAD (SEQ ID NO: 4147), YGYATTADG (SEQ ID NO: 4148), YAYAT (SEQ ID NO: 4149), YAYATT (SEQ ID NO: 4150), YAYATTA (SEQ ID NO: 4151), YAYATTAD (SEQ ID NO: 4152), YAYATTADG (SEQ ID NO: 4153), LYGYAT (SEQ ID NO: 4154), LYGYATT (SEQ ID NO: 4155), LYGYATTA (SEQ ID NO: 4156), LYGYATTAD (SEQ ID NO: 4157), LYGYATTADG (SEQ ID NO: 4158), LYAYAT (SEQ ID NO: 4159), LYAYATT (SEQ ID NO: 4160), LYAYATTA (SEQ ID NO: 4161), LYAYATTAD (SEQ ID NO: 4162), LYAYATTADG (SEQ ID NO: 4163), VYGYAT (SEQ ID NO: 4164), VYGYATT (SEQ ID NO: 4165), VYGYATTA (SEQ ID NO: 4166), VYGYATTAD (SEQ ID NO: 4167); VYGYATTADG (SEQ ID NO: 4168), VYAYAT (SEQ ID NO: 4169), VYAYATT (SEQ ID NO: 4170), VYAYATTA (SEQ ID NO: 4171), VYAYATTAD (SEQ ID NO: 4172), VYAYATTADG (SEQ ID NO: 4173), IYGYAT (SEQ ID NO: 4174), IYGYATT (SEQ ID NO: 4175), IYGYATTA (SEQ ID NO: 4176), IYGYATTAD (SEQ ID NO: 4177), IYGYATTADG (SEQ ID NO: 4178), IYAYAT (SEQ ID NO: 4179), IYAYATT (SEQ ID NO: 4180), IYAYATTA (SEQ ID NO: 4181), IYAYATTAD (SEQ ID NO: 4182) or IYAYATTADG (SEQ ID NO: 4183); or (b) an analogue of any of the foregoing sequences that differs in one or more substitutions, deletions, additions and/or insertions such that that ability of the analogue to modulate a desmocollin-mediated function is not substantially diminished. Linear peptides having such sequences may be modified at the N- and/or C-termini, as in the peptides N-Ac-LYGYATTADG-NH₂ (SEQ ID NO: 4184) N-Ac-LYAYATTADG-NH2 (SEQ ID NO: 4185) N-Ac-VYGYATTADG-NH2 (SEQ ID NO: 4186) N-Ac-VYAYATTADG-NH2 (SEQ ID NO: 4187) N-Ac-IYGYATTADG-NH2 (SEQ ID NO: 4188) and N-Ac-IYAYATTADG-NH2 (SEQ ID NO: 4189).

[0036] Within other specific embodiments, a modulating agent as provided herein may comprise: (a) one or more Desmocollin-2 CAR sequences selected from the group consisting of: FAT, FATT (SEQ ID NO: 4190), FATTP (SEQ ID NO: 4191), FATTPD (SEQ ID NO: 4192), FATTPDG (SEQ ID NO: 4193), AFAT (SEQ ID NO: 4194), AFATT (SEQ ID NO: 4195), AFATTP (SEQ ID NO: 4196), AFATTPD (SEQ ID NO: 4197), AFATTPDG (SEQ ID NO: 4198), IAFAT (SEQ ID NO: 4199), IAFATT (SEQ ID NO: 4200), IAFATTP (SEQ ID NO: 4201), IAFATTPD (SEQ ID NO: 4202), IAFATTPDG (SEQ ID NO: 4203), IIAFAT (SEQ ID NO: 4204), IIAFATT (SEQ ID NO: 4205), IIAFATTP (SEQ ID NO: 4206), IIAFATTPD (SEQ ID NO: 4207), IIAFATTPDG (SEQ ID NO: 4208), LIAFAT (SEQ ID NO: 4209), LIAFATT (SEQ ID NO: 4210), LIAFATTP (SEQ ID NO: 4211), LIAFATTPD (SEQ ID NO: 4212), LIAFATTPDG (SEQ ID NO: 4213); or (b) an analogue of any of the foregoing sequences that differs in one or more substitutions, deletions, additions and/or insertions such that that ability of the analogue to modulate a desmocollin-mediated function is not substantially diminished. Linear peptides having such sequences may be modified at the N- and/or C-termini, as in the peptides N-Ac-IIAFATTPDG-NH2 (SEQ ID NO: 4214) and N-Ac-LIAFATTPDG-NH2 (SEQ ID NO: 4215).

[0037] Within other specific embodiments, a modulating agent as provided herein may comprise: (a) one or more desmocollin-3 or desmocollin-4 CAR sequences selected from the group consisting of: YAS, YAST (SEQ ID NO:312 4216), YASTA (SEQ ID NO: 4217), YASTAD (SEQ ID NO: 4218), YASTADG (SEQ ID NO: 4219), AYAS (SEQ ID NO: 4220), AYAST (SEQ ID NO: 4221), AYASTA (SEQ ID NO: 4222), AYASTAD (SEQ ID NO: 4223), AYASTADG (SEQ ID NO: 4224), IAYAS (SEQ ID NO: 4225), IAYAST (SEQ ID NO: 4226), IAYASTA (SEQ ID NO: 4227), IAYASTAD (SEQ ID NO: 4228), IAYASTADG (SEQ ID NO: 4229), LIAYAS (SEQ ID NO: 4230), LIAYAST (SEQ ID NO: 4231), LIAYASTA (SEQ ID NO: 4232), LIAYASTAD (SEQ ID NO: 4233), LIAYASTADG (SEQ ID NO: 4234); or (b) an analogue of any of the foregoing sequences that differs in one or more substitutions, deletions, additions and/or insertions such that that ability of the analogue to modulate a desmocollin-mediated function is not substantially diminished. Linear peptides having such sequences may be modified at the N- and/or C-termini, as in the peptides N-Ac-LIAYASTADG-NH2 (SEQ ID NO: 4235).

[0038] Within certain specific embodiments, a modulating agent as provided herein comprises: (a) one or more cadherin-related neuronal receptor (cnr) CAR sequences selected from the group consisting of DPV, DPVS (SEQ ID NO:572), DPVSG (SEQ ID NO:573), IDPV (SEQ ID NO:574), IDPVS (SEQ ID NO:575), IDPVSG (SEQ ID NO:576), HIDPV (SEQ ID NO:577), HIDPVS (SEQ ID NO:578), HIDPVSG (SEQ ID NO:579), FHIDPV (SEQ ID NO:580), FHIDPVS (SEQ ID NO:581), FHIDPVSG (SEQ ID NO:582), KFHIDPV (SEQ ID NO:583), KFHIDPVS (SEQ ID NO:584), KFHIDPVSG (SEQ ID NO:585), DAD, DADT (SEQ ID NO:586), DADTG (SEQ ID NO:587), IDAD (SEQ ID NO:588), IDADT (SEQ ID NO:589), IDADTG (SEQ ID NO:590), SIDAD (SEQ ID NO:591), SIDADT (SEQ ID NO:592), SIDADTG (SEQ ID NO:593), FSIDAD (SEQ ID NO:594), FSIDADT (SEQ ID NO:595), FSIDADTG (SEQ ID NO:596), QFSIDAD (SEQ ID NO:597), QFSIDADT (SEQ ID NO:598), QFSIDADTG (SEQ ID NO:599), DSV, DSVS (SEQ ID NO:600), DSVSG (SEQ ID NO:601), IDSV (SEQ ID NO:602), IDSVS (SEQ ID NO:603), IDSVSG (SEQ ID NO:604), HIDSV (SEQ ID NO:605), HIDSVS (SEQ ID NO:606), HIDSVSG (SEQ ID NO:607), FHIDSV (SEQ ID NO:608), FHIDSVS (SEQ ID NO:609), FHIDSVSG (SEQ ID NO:610), TFHIDSV (SEQ ID NO:611), TFHIDSVS (SEQ ID NO:612), TFHIDSVSG (SEQ ID NO:613), DSN, DSNS (SEQ ID NO:614), DSNSG (SEQ ID NO:615), IDSN (SEQ ID NO:616), IDSNS (SEQ ID NO:617), IDSNSG (SEQ ID NO:618), NIDSN (SEQ ID NO:619), NIDSNS (SEQ ID NO:620), NIDSNSG (SEQ ID NO:621), FNIDSN (SEQ ID NO:622), FNIDSNS (SEQ ID NO:623), FNIDSNSG (SEQ ID NO:624), AFNIDSN (SEQ ID NO:625), AFNIDSNS (SEQ ID NO:626), AFNIDSNSG (SEQ ID NO:627), DSS, DSSS (SEQ ID NO:628), DSSSG (SEQ ID NO:629), IDSS (SEQ ID NO:630), IDSSS (SEQ ID NO:631), IDSSSG (SEQ ID NO:632), TIDSS (SEQ ID NO:633), TIDSSS (SEQ ID NO:634), TIDSSSG (SEQ ID NO:635), FTIDSS (SEQ ID NO:636), FTIDSSS (SEQ ID NO:637), FTIDSSSG (SEQ ID NO:63.8), KFTIDSS (SEQ ID NO:639), KFTIDSSS (SEQ ID NO:640), KFTIDSSSG (SEQ ID NO:641), DEK, DEKN (SEQ ID NO:642), DEKNG (SEQ ID NO:643), LDEK (SEQ ID NO:644), LDEKN (SEQ ID NO:645), LDEKNG (SEQ ID NO:646), TLDEK (SEQ ID NO:647), TLDEKN (SEQ ID NO:648), TLDEKNG (SEQ ID NO:649), FTLDEK (SEQ ID NO:650), FTLDEKN (SEQ ID NO:651), FTLDEKNG (SEQ ID NO:652), LFTLDEK (SEQ ID NO:653), LFTLDEKN (SEQ ID NO:654), LFTLDEKNG (SEQ ID NO:655), NEK, NEKT (SEQ ID NO:656), NEKTG (SEQ ID NO:657), INEK (SEQ ID NO:658), INEKT (SEQ ID NO:659), INEKTG (SEQ ID NO:660), LINEK (SEQ ID NO:661), LINEKT (SEQ ID NO:662), LINEKTG (SEQ ID NO:663), FLINEK (SEQ ID NO:664), FLINEKT (SEQ ID NO:665), FLINEKTG (SEQ ID NO:666), KFLINEK (SEQ ID NO:667), KFLINEKT (SEQ ID NO:668) and KFLINEKTG (SEQ ID NO:4052); or (b) an analogue of any of the foregoing sequences that differs in one or more substitutions, deletions, additions and/or insertions such that that ability of the analogue to modulate a cadherin-related neuronal receptor-mediated function is not substantially diminished. For example, the agent may comprise a linear peptide having the sequence N-Ac-KFHIDPVSG-NH₂ (SEQ ID NO:585), N-Ac-QFSIDADTG-NH₂ (SEQ ID NO:599), N-Ac-TFHIDSVSG-NH₂ (SEQ ID NO:613), N-Ac-AFNIDSNSG-NH₂ (SEQ ID NO:627), N-Ac-KFTIDSSSG-NH₂ (SEQ ID NO:641), N-Ac-LFTLDEKNG-NH₂ (SEQ ID NO:655) or N-Ac-KFLINEKTG-NH₂ (SEQ ID NO:4052). The cnr CAR sequence may, but need not, be present within a cyclic peptide.

[0039] Within certain specific embodiments, a modulating agent as provided herein may comprise: (a) one or more OB-cadherin CAR sequences selected from the group consisting of DDK, IDDK (SEQ ID NO:4051) DDKS (SEQ ID NO:73), VIDDK (SEQ ID NO:74), IDDKS (SEQ ID NO:75), VIDDKS (SEQ ID NO:76), DDKSG (SEQ ID NO:77), IDDKSG (SEQ ID NO:78), VIDDKSG (SEQ ID NO:79), FVIDDK (SEQ ID NO:80), FVIDDKS (SEQ ID NO:81), FVIDDKSG (SEQ ID NO:82), IFVIDDK (SEQ ID NO:83), IFVIDDKS (SEQ ID NO:84), IFVIDDKSG (SEQ ID NO:85), EEY, IEEY (SEQ ID NO:86), EEYT (SEQ ID NO:87), VIEEY (SEQ ID NO:88), IEEYT (SEQ ID NO:89), VIEEYT (SEQ ID NO:90), EEYTG (SEQ ID NO:91), IEEYTG (SEQ ID NO:92), VIEEYTG (SEQ ID NO:93), FVIEEY (SEQ ID NO:94), FVIEEYT (SEQ ID NO:95), FVIEEYTG (SEQ ID NO:96), FFVIEEY (SEQ ID NO:97), FEVIEEYT (SEQ ID NO:98), FFVIEEYTG (SEQ ID NO:99), EAQ, VEAQ (SEQ ID NO:100), EAQT (SEQ ID NO:101), SVEAQ (SEQ ID NO:102), VEAQT (SEQ ID NO:103), SVEAQT (SEQ ID NO:104), EAQTG (SEQ ID NO:105), VEAQTG (SEQ ID NO:106), SVEAQTG (SEQ ID NO:107), FSVEAQ (SEQ ID NO:108), FSVEAQT (SEQ ID NO:109), FSVEAQTG (SEQ ID NO:110), YFSVEAQ (SEQ ID NO:111), YFSVEAQT (SEQ ID NO:112) and YFSVEAQTG (SEQ ID NO:113); or (b) an analogue of any of the foregoing sequences that differs in one or more substitutions, deletions, additions and/or insertions such that that ability of the analogue to modulate an OB-cadherin-mediated function is not substantially diminished. For example, the agent may comprise a linear peptide having the sequence N-Ac-IFVIDDKSG-NH₂ (SEQ ID NO:85), N-Ac-FFVIEEYTG-NH₂ (SEQ ID NO:99) or N-Ac-YFSVEAQTG-NH₂ (SEQ ID NO:113). The OB-cadherin CAR sequence may, but need not, be present within a cyclic peptide.

[0040] Within certain specific embodiments, a modulating agent as provided herein may comprise: (a) one or more cadherin-5 CAR sequences selected from the group consisting of DAE, VDAE (SEQ ID NO:114), DAET (SEQ ID NO:115), RVDAE (SEQ ID NO:116), VDAET (SEQ ID NO:117), RVDAET (SEQ ID NO:118), DAETG (SEQ ID NO:119), VDAETG (SEQ ID NO:120), RVDAETG (SEQ ID NO:121), FRVDAE (SEQ ID NO:122), FRVDAET (SEQ ID NO:123), FRVDAETG (SEQ ID NO:124), VFRVDAE (SEQ ID NO:125), VFRVDAET (SEQ ID NO:126) and VFRVDAETG (SEQ ID NO:127); or (b) an analogue of any of the foregoing sequences that differs in one or more substitutions, deletions, additions and/or insertions such that that ability of the analogue to modulate a cadherin-5-mediated function is not substantially diminished. For example, the agent may comprise a linear peptide having the sequence N-Ac-VFRVDAETG-NH₂ (SEQ ID NO:127). The cadherin-5 CAR sequence may, but need not, be present within a cyclic peptide.

[0041] Any of the above modulating agents may, within certain embodiments, be linked to one or more of a drug, detectable marker, targeting agent or support material. Alternatively, or in addition, a modulating agent as described above, may further comprise one or more of: (a) a CAR sequence that is specifically recognized by an adhesion molecule other than the particular nonclassical cadherin; and/or (b) an antibody or antigen-binding fragment thereof that specifically binds to a CAR sequence that is specifically recognized by an adhesion molecule other than the nonclassical cadherin. For example, such an adhesion molecule may be a classical cadherin, integrin, occludin, claudin, N-CAM, fibronectin, laminin or other extracellular matrix protein. In addition, or alternatively, a modulating agent may comprise a CAR sequence from a different non-classical cadherin, such that multiple non-classical cadherin CAR sequences are linked together within the modulating agent.

[0042] Within other aspects, the present invention provides pharmaceutical compositions comprising a modulating agent as described above in combination with a pharmaceutically acceptable carrier. Within such compositions, the modulating agent may, but need not, be present within a sustained-release formulation. Such compositions may, within certain embodiments, further comprise a drug and/or a modulator of cell adhesion that comprises one or more of: (a) a CAR sequence that is specifically recognized by an adhesion molecule other than the nonclassical cadherin; and/or (b) an antibody or antigen-binding fragment thereof that specifically binds to a CAR sequence that is specifically recognized by an adhesion molecule other than the nonclassical cadherin.

[0043] The present invention further provides, within other aspects, methods for modulating one or more nonclassical cadherin-mediated functions. Such methods generally comprise contacting a nonclassical cadherin-expressing cell with a modulating agent as described above. Suitable cells include, but are not limited to, epithelial cells, endothelial cells, neural cells, tumor cells and lymphocytes. Within such methods, the modulating agent may, but need not, be present within a pharmaceutical composition as recited above.

[0044] Within certain aspects, methods are provided for inhibiting adhesion of nonclassical cadherin-expressing cells in a mammal, comprising administering to a mammal a modulating agent as provided above that inhibits cell adhesion mediated by the nonclassical cadherin. Such modulating agents should inhibit cell adhesion with an activity that is not substantially diminished relative to the activity of the nonclassical cadherin in soluble form, within a cell adhesion assay such as the assays provided herein.

[0045] Within further aspects, the present invention provides methods for enhancing the delivery of a drug through the skin of a mammal, comprising contacting epithelial cells of a mammal with a drug and a modulating agent as described above, wherein the step of contacting is performed under conditions and for a time sufficient to allow passage of the drug across the epithelial cells, and wherein the modulating agent inhibits nonclassical cadherin-mediated cell adhesion. Such modulating agents may pass into the blood stream of the mammal. Within certain embodiments, the modulating agent is linked to the drug. The step of contacting may, but need not, be performed via a skin patch comprising the modulating agent and the drug, and such skin patches are further provided herein. Preferred modulating agents for use within such methods are those that inhibit cell adhesion mediated by OB-cadherin, cadherin-5, a desmoglein and/or a desmocollin, as described herein.

[0046] Methods are further provided for facilitating blood sampling in a mammal, comprising contacting epithelial cells of a mammal with a modulating agent as described above, wherein the modulating agent inhibits nonclassical cadherin-mediated cell adhesion, and wherein the step of contacting is performed under conditions and for a time sufficient to allow passage of one or more blood components across the epithelial cells. Preferred modulating agents for use within such methods are those that inhibit cell adhesion mediated by OB-cadherin, cadherin-5, a desmoglein and/or a desmocollin, as described herein. The step of contacting may be performed via a skin patch comprising the modulating agent, and (optionally) a reagent for detecting a blood component of interest, and such kits are specifically provided herein. Within certain embodiments, the epithelial cells are skin cells or are gum cells.

[0047] Within further aspects, methods are provided for enhancing the delivery of a drug to a tumor in a mammal, comprising administering to a mammal a modulating agent as described above, wherein the modulating agent inhibits nonclassical cadherin-mediated cell adhesion. Suitable tumors include, but are not limited to, bladder tumors, ovarian tumors, breast tumors, stomach tumors and kidney tumors, and the modulating agent may be administered locally to the tumor or may be administered systemically. Preferred modulating agents for use within such methods are those that inhibit cell adhesion mediated by OB-cadherin, cadherin-5, cadherin-6, a desmoglein and/or a desmocollin, as described herein.

[0048] Within other aspects, the present invention provides methods for treating cancer and/or inhibiting metastasis in a mammal, comprising administering to a mammal a modulating agent as described above, wherein the modulating agent inhibits cadherin-mediated cell adhesion. The mammal may be afflicted with a cancer such as a carcinoma, leukemia or melanoma, and the modulating agent may be administered to the tumor or systemically. Preferred modulating agents for use within such methods are those that inhibit cell adhesion mediated by OB-cadherin, cadherin-5, cadherin-6, a desmoglein and/or a desmocollin, as described herein.

[0049] Within other aspects, methods are provided for inhibiting angiogenesis in a mammal, comprising administering to a mammal a modulating agent as described above, wherein the modulating agent inhibits nonclassical cadherin-mediated cell adhesion. Preferred modulating agents for use within such methods are those that inhibit cell adhesion mediated by cadherin-5, as described herein.

[0050] The present invention further provides, within other aspects, methods for inducing apoptosis in a nonclassical cadherin-expressing cell, comprising contacting a nonclassical cadherin-expressing cell with a modulating agent as described above, wherein the modulating agent inhibits nonclassical cadherin-mediated cell adhesion.

[0051] In further aspects, methods are provided for preventing or treating obesity in a mammal, comprising administering to a mammal a modulating agent as described above, wherein the modulating agent inhibits an OB-cadherin and/or cadherin-5 mediated function.

[0052] Methods are further provided for stimulating blood vessel regression, comprising administering to a mammal a modulating agent as described above, wherein the modulating agent inhibits an OB-cadherin and/or cadherin-5 mediated function.

[0053] The present invention further provides, within other aspects, methods for enhancing drug delivery to the central nervous system of a mammal, comprising administering to a mammal a modulating agent as described above, wherein the modulating agent inhibits a nonclassical cadherin-mediated function. Preferably, the modulating agent inhibits an OB-cadherin and/or cadherin-5 mediated function.

[0054] The present invention further provides, in other aspects, methods for enhancing and/or directing neurite outgrowth, comprising contacting a neuron with a modulating agent as described above, wherein the modulating agent enhances a nonclassical cadherin-mediated function. Preferably, the modulating agent enhances a function mediated by cadherin-7, cadherin-8, cadherin-12, cadherin-14, cadherin-15, T-cadherin, PB-cadherin, a protocadherin and/or a cnr.

[0055] Methods are also provided, within further aspects, for treating a demyelinating neurological disease such as multiple sclerosis in a mammal, comprising administering to a mammal a modulating agent as described above. Within certain embodiments, the modulating agent is administered by implantation with Schwann cells, oligodendrocyte progenitor cells and/or oligodendrocytes. Preferably, the modulating agent enhances a function mediated by cadherin-7, cadherin-8, cadherin-12, cadherin-14, cadherin-15, T-cadherin, PB-cadherin, a protocadherin and/or a cnr.

[0056] Methods are further provided for increasing vasopermeability in a mammal, comprising administering to a mammal a modulating agent as described above, wherein the modulating agent inhibits a nonclassical cadherin-mediated function. Preferably, the modulating agent inhibits OB-cadherin and/or cadherin-5 mediated cell adhesion.

[0057] Within other aspects, the present invention provides methods for enhancing adhesion of nonclassical cadherin-expressing cells, comprising contacting nonclassical cadherin-expressing cells with a modulating agent as described above, wherein the modulating agent enhances nonclassical cadherin-mediated cell adhesion, wherein the step of contacting is performed under conditions and for a time sufficient to detectably enhance adhesion of the cells. Within certain embodiments, modulating agents for use within such methods are linked to a support molecule or a solid support.

[0058] Within related aspects, the present invention provides methods for facilitating wound healing and/or reducing scar tissue in a mammal, comprising contacting a wound in a mammal with a modulating agent as described above, wherein the modulating agent enhances cadherin-mediated cell adhesion. Preferably, the modulating agent enhances OB-cadherin, cadherin-5, desmoglein and/or desmocollin mediated cell adhesion. Within certain embodiments, modulating agents for use within such methods are linked to a support molecules or a solid support.

[0059] Methods are also provided, within other aspects, for enhancing adhesion of foreign tissue implanted within a mammal, comprising contacting a site of implantation of foreign tissue in a mammal with a modulating agent as described above, wherein the modulating agent enhances nonclassical cadherin-mediated cell adhesion. Such foreign tissue may be a skin graft or organ implant. Within certain embodiments, the modulating agent is linked to a support material. Preferably, the modulating agent enhances OB-cadherin, cadherin-5, desmoglein and/or desmocollin mediated cell adhesion. Within certain embodiments, modulating agents for use within such methods are linked to a support molecules or a solid support.

[0060] Within further aspects, the present invention provides methods for inhibiting synaptic stability in a mammal, comprising administering to a mammal a modulating agent as described above, wherein the modulating agent inhibits a cnr-mediated function.

[0061] Within further aspects, methods are provided for modulating the immune system of a mammal, comprising administering to a mammal a modulating agent as described above, wherein the modulating agent inhibits a nonclassical cadherin-mediated function. Preferably, the modulating agent inhibits OB-cadherin, cadherin-5, cadherin-6 and/or cadherin-8 mediated cell adhesion.

[0062] Within further aspects, methods are provided for treating an autoimmune blistering disorder in a mammal, comprising administering to a mammal a modulating agent as described above, wherein the modulating agent enhances desmosomal cadherin-mediated cell adhesion. Within certain embodiments, such an agent may be administered topically to a blister. Modulating agents for use within such methods may be linked to a support molecule or a solid support. In certain embodiments, the modulating agent is a desmosomal (e.g., desmoglein and/or desmocollin) modulating agent.

[0063] Within other aspects, the present invention provides methods for preventing pregnancy in a mammal, comprising administering to a mammal a modulating agent as described above, wherein the modulating agent inhibits a nonclassical cadherin-mediated function. Preferably, the modulating agent inhibits OB-cadherin or cadherin-5 mediated cell adhesion.

[0064] The present invention further provides methods for detecting the presence of nonclassical cadherin-expressing cells in a sample, comprising: (a) contacting a sample with an antibody or antigen-binding fragment thereof that binds to a nonclassical CAR sequence as described above under conditions and for a time sufficient to allow formation of an antibody-cadherin complex; and (b) detecting the level of antibody-cadherin complex, and therefrom detecting the presence of nonclassical cadherin expressing cells in a sample. The antibody may be linked to a support material or a detectable marker such as a fluorescent marker. In certain embodiments, the step of detecting is performed using fluorescence activated cell sorting.

[0065] Kits for detecting the presence of cadherin-expressing cells in a sample are also provided. Such kits may comprise: (a) an antibody or antigen-binding fragment thereof that specifically binds to a nonclassical cadherin CAR sequence; and (b) a detection reagent.

[0066] Within other aspects, the present invention provides methods for identifying a compound capable of modulating a nonclassical cadherin-mediated function, comprising: (a) contacting an antibody or antigen-binding fragment thereof that specifically binds to a nonclassical cadherin CAR sequence as described above with a test compound; and (b) detecting the level of antibody or fragment that binds to the test compound, and therefrom identifying a compound capable of modulating cadherin-mediated cell adhesion. Within other aspects, the present invention provides compositions and methods for diagnosing cancers which express nonclassical cadherins, such as breast, ovarian and prostate cancer, as well as leukemia. Certain methods provided herein employ binding agents, such as antibodies and fragments thereof, that specifically recognize a nonclassical cadherin, for example OB-cadherin or N-cadherin. Other methods employ one or more polynucleotides capable of hybridizing to a polynucleotide encoding a nonclassical cadherin.

[0067] Within certain aspects, the present invention provides methods for determining the presence or absence of a cancer in a patient, comprising the steps of: (a) contacting a biological sample obtained from a patient with a binding agent that specifically binds to a nonclassical cadherin, for example OB-cadherin or N-cadherin; and (b) detecting in the sample an amount of polypeptide that binds to the binding agent, relative to a predetermined cut-off value, and therefrom determining the presence or absence of a cancer in the patient.

[0068] Within further aspects, methods are provided for monitoring the progression of a cancer in a patient, comprising the steps of: (a) contacting a biological sample obtained from a patient at a first point in time with a binding agent that specifically binds to a nonclassical cadherin, such as OB-cadherin or N-cadherin; (b) detecting in the sample an amount of polypeptide that binds to the binding agent; (c) repeating steps (a) and (b) using a biological sample obtained from the patient at a subsequent point in time; and (d) comparing the amount of polypeptide detected in step (c) to the amount detected in step (b) and therefrom monitoring the progression of the cancer in the patient.

[0069] Within other aspects, methods are provided for evaluating the metastatic potential of a cancer in a patient, comprising the steps of: (a) contacting a biological sample obtained from a patient afflicted with cancer with a binding agent that specifically binds to a nonclassical cadherin, such as OB-cadherin or N-cadherin; and (b) detecting in the sample an amount of polypeptide that binds to the binding agent, relative to a predetermined cut-off value, and therefrom evaluating the metastatic potential of the cancer in the patient.

[0070] Kits for determining the presence or absence of a cancer in a patient are also provided. Such kits may comprise: (a) an antibody or antigen-binding fragment thereof that specifically binds to a nonclassical cadherin, such as OB-cadherin or N-cadherin CAR sequence; and (b) a detection reagent.

[0071] The present invention further provides methods for determining the presence or absence of a metastatic cancer in a patient, comprising the steps of: (a) contacting a biological sample obtained from a patient with an oligonucleotide that hybridizes to a polynucleotide encoding a nonclassical cadherin, such as OB-cadherin or N-cadherin; and (b) detecting in the sample a level of a polynucleotide that hybridizes to the oligonucleotide, relative to a predetermined cut-off value, and therefrom determining the presence or absence of a metastatic cancer in the patient. Within certain embodiments, the amount of mRNA is detected via polymerase chain reaction using, for example, at least one oligonucleotide primer that hybridizes to a polynucleotide that encodes a nonclassical cadherin, such as OB-cadherin or N-cadherin, or a complement of such a polynucleotide. Within other embodiments, the amount of mRNA is detected using a hybridization technique, employing an oligonucleotide probe that hybridizes to a polynucleotide that encodes a nonclassical cadherin, such as OB-cadherin or N-cadherin, or a complement of such a polynucleotide. In a preferred embodiment, at least one of the oligonucleotide primers comprises at least about 10 contiguous nucleotides of a DNA molecule encoding a nonclassical cadherin, such as OB-cadherin or N-cadherin.

[0072] In related aspects, methods are provided for monitoring progression of a cancer in a patient, comprising the steps of: (a) contacting a biological sample obtained from a patient with an oligonucleotide that hybridizes to a polynucleotide encoding a nonclassical cadherin, such as OB-cadherin or N-cadherin; (b) detecting in the sample an amount of polynucleotide that hybridizes to the oligonucleotide; (c) repeating steps (a) and (b) using a biological sample obtained from the patient at a subsequent point in time; and (d) comparing the amount of polynucleotide detected in step (c) with the amount detected in step (b) and therefrom monitoring progression of a cancer in the patient.

[0073] Within other aspects, methods are provided for evaluating the metastatic potential of a cancer in a patient, comprising the steps of: (a) contacting a biological sample obtained from a patient with an oligonucleotide that hybridizes to a polynucleotide encoding a nonclassical cadherin, such as OB-cadherin or N-cadherin; and (b) detecting in the sample an amount of a polynucleotide that hybridizes to the oligonucleotide, relative to a predetermined cut-off value, and therefrom evaluating the metastatic potential of the cancer in the patient.

[0074] In related aspects, diagnostic kits comprising the above oligonucleotide probes or primers are provided.

[0075] These and other aspects of the present invention will become apparent upon reference to the following detailed description and attached drawings. All references disclosed herein are hereby incorporated by reference in their entirety as if each was incorporated individually.

### BRIEF DESCRIPTION OF THE DRAWINGS

[0076] FIGS. 1A-1AA are diagrams depicting the structure of classical (FIG. 1A) and nonclassical cadherins (FIGS. 1B to 1AA). The extracellular domains are designated EC1-EC5 for most cadherins; EC1-EC7 for LI-cadherin and EC1-EC6 for protocadherins and cnr. The hydrophobic domain that transverses the plasma membrane (PM) is represented by TM, and the varying number of cytoplasmic domains are represented by CP. The calcium binding motifs for classical cadherins are shown in FIG. 1A by DXNDN (SEQ ID NO:1), DXD and LDRE (SEQ ID NO:2), and the calcium binding motifs for other cadherins are also indicated above the extracellular domains. Below the extracellular domains, the nine amino acid CAR sequences are shown.

[0077] FIGS. 2A-2B provide the amino acid sequences of representative mammalian nonclassical cadherin extracellular domains, as indicated (SEQ ID NOs 4-43). Calcium binding motifs are shown in bold, and representative CAR sequences are shown in bold and underlined.

[0078] FIG. 3 provides the amino acid sequences of representative mammalian OB-cadherin EC1 domains: human OB-cadherin (SEQ ID NO:44) and mouse OB-cadherin (SEQ ID NO:45).

[0079] FIGS. 4A-4C provide structures of representative modulating agents (SEQ ID NOS: 85, 669-674, 676, 677, 683, 697 and 717).

[0080] FIGS. 5A-5C are photographs showing cultures of human breast cancer cells in the presence (FIGS. 5B and 5C) and absence (FIG. 5A) of a representative linear peptide modulating agent. FIG. 5A shows the cells 24 hours after exposure to 100 μl water/1 ml culture medium (magnification 200×). FIGS. 5B and 5C show the cells 24 hours after exposure to 100 μL of a solution containing 10 mg/mL N-Ac-IFVIDDKSG-NH₂ (SEQ ID NO:85) per 1 mL culture medium (magnifications of 200× and 100×, respectively). Arrows indicate rounded cells.

[0081] FIGS. 6A-6F are photographs showing human umbilical vein endothelial cells in the presence (FIGS. 6E and 6F) and absence (FIGS. 6A and 6B) of 75 μg/mL of a representative linear peptide modulating agent N-Ac-VFRVDAETGD-NH₂ (SEQ ID NO:64). FIGS. 6C and 6D show the cells in the presence of 75 μg/mL of a similar peptide without the terminal functional groups. Cells were incubated with peptide for 60 minutes, fixed and immunolabeled with monoclonal antibodies directed against VE-cadherin, and were observed at 400× (A, C and E) and 1000× (B, D and F).

[0082] FIGS. 7A-7F provide further structures of representative modulating agents (SEQ ID NOS: 736, 823, 910, 983, 1050, 1064, 1079, 1303, 1373, 1388, 1589, 1649, 1736, 1797, 1884, 1945, 1958, 2092, 2153, 2240, 2300, 2333, 2629, 2716, 2746, 2731, 3066, 3081, 3096, 3327, 3342, 3572, 3587, 3602, 3617, 3633, 3648, 3663, 4039, 1045).

[0083] FIG. 8 is a photograph illustrating the results of PCR analysis to detect the presence of OB-cadherin in metastatic human ovarian cancer cells, but not in well-differentiated human ovarian cancer cells. RT-PCR products from two cell lines are shown: SKOV3 in lane 1 and OVCAR3 in lane 2. The primers used were specific for OB-cadherin (OB-cad) and hypoxanthine phosphoribosyltransferase (HPRT) as indicated, with an expected PCR product of 745 bp and 352 bp, respectively. Products were stained with ethidium bromide and resolved by agarose gel electrophoresis. Lane M represents a 1 kb ladder (Gibco/BRL).

[0084] FIG. 9 is a photograph illustrating the results of PCR analysis detecting the presence of OB-cadherin in leukemic cells. RT-PCR products were generated from lymphocytes of a human B-CLL patient (lane 1) and mouse liver (lane 2). The primers used were specific for OB-cadherin (OB-cad, top panel) and hypoxanthine phosphoribosyltransferase (HPRT, bottom panel), with an expected PCR product of 745 bp and 352 bp, respectively. Products were stained with ethidium bromide and resolved by agarose gel electrophoresis. Lane M represents a 1 kb ladder (Gibco/BRL).

[0085] FIG. 10 depicts the structures of representative desmosomal cyclic peptide modulating agents.

### DETAILED DESCRIPTION OF THE INVENTION

[0086] As noted above, the present invention provides methods for modulating cadherin-mediated functions, such as cell adhesion. The present invention is based upon the identification of previously unknown cell adhesion recognition (CAR) sequences present in nonclassical cadherins. A modulating agent may generally comprise one or more nonclassical cadherin CAR sequences (or analogues or mimetics thereof), with or without one or more additional CAR sequences, as described below. Peptide CAR sequences may be present within a linear or cyclic peptide. Alternatively, or in addition, a modulating agent may comprise a polynucleotide encoding a peptide comprising one or more nonclassical cadherin CAR sequences and/or a modulating agent may comprise a substance (such as an antibody or antigen-binding fragment thereof) that specifically binds to a nonclassical cadherin CAR sequence.

[0087] In general, to modulate a nonclassical cadherin-mediated function, a cell that expresses a nonclassical cadherin is contacted with a modulating agent either in vivo or in vitro. Within certain aspects, the methods provided herein inhibit a nonclassical cadherin-mediated function. Such methods include, for example, methods for treating diseases or other conditions characterized by undesirable cell adhesion or for facilitating drug delivery to a specific tissue or tumor. Certain methods may inhibit cell adhesion (e.g., cancer cell adhesion), as well as cancer invasion and metastasis. Alternatively, a modulating agent may, such as when linked to a matrix or to another modulating agent via a linker, be used to enhance a nonclassical cadherin-mediated function, such as cell adhesion. Such conjugates may be used, for example, to facilitate wound healing or the adhesion of implants.

Modulating Agents

[0088] As noted above, the term “modulating agent,” as used herein, refers to a molecule comprising at least one of the following components:
[0089] (a) a linear or cyclic peptide sequence that is at least 50% identical to a nonclassical cadherin CAR sequence (i.e., a nonclassical cadherin CAR sequence or an analogue thereof that retains at least 50% sequence identity);
[0090] (b) a mimetic (e.g., peptidomimetic or small molecule mimic) of a nonclassical cadherin CAR sequence;
[0091] (c) a substance, such as an antibody or antigen-binding fragment thereof, that specifically binds a nonclassical cadherin CAR sequence; and/or
[0092] (d) a polynucleotide encoding a polypeptide that comprises a nonclassical cadherin CAR sequence or analogue thereof.

[0093] A modulating agent may consist entirely of one or more of the above elements, or may additionally comprise further peptide and/or non-peptide regions. Additional peptide regions may be derived from a nonclassical cadherin (preferably an extracellular domain that comprises a CAR sequence) and/or may be heterologous. Within certain preferred embodiments, a modulating agent contains no more than 85 consecutive amino acid residues, and preferably no more than 50 consecutive amino acid residues, present within a nonclassical cadherin.

[0094] A modulating agent is further capable of modulating a function mediated by a nonclassical cadherin. Such activity may generally be assessed using, for example, representative assays provided herein. Certain modulating agents inhibit an interaction between nonclassical cadherin molecules and/or between a nonclassical cadherin and a different adhesion molecule. For functions (e.g., cell adhesion) that are inhibited by a full length nonclassical cadherin, such a modulating agent may inhibit the function with an activity that is not substantially diminished relative to the full length nonclassical cadherin (i.e., the modulating agent inhibits the function at least as well as soluble cadherin, when contacted with cells that express the cadherin). For example, a modulating agent may be as effective as soluble cadherin in preventing and/or disrupting adhesion of cadherin-expressing cells. Alternatively, to enhance adhesion of nonclassical cadherin-expressing cells, a modulating agent may comprise an antibody or antigen-binding fragment thereof and/or multiple peptides or mimetics linked to a support material. Such modulating agents may function as a biological glue to bind nonclassical cadherin-expressing cells, and should result in a detectable enhancement of cell adhesion (preferably an enhancement that is at least as great as that observed for immobilized cadherin or antibody directed against the cadherin).

[0095] The term “nonclassical cadherin,” as used herein, refers to a polypeptide that contains characteristic cadherin repeats, but does not contain an HAV CAR sequence. As used herein, a “cadherin repeat” refers to an amino acid sequence that is approximately 110 amino acid residues in length (generally 100 to 120 residues, preferably 105 to 115 residues), comprises an extracellular domain, and contains three calcium binding motifs (DXD, XDXE and DXXDX; SEQ ID NOS: 46 and 47 respectively) in the same order and in approximately the same position (see, e.g., FIG. 2). The presence of an extracellular domain may generally be determined using well known techniques, such as the presence of one or more of: a hydrophilic sequence, a region that is recognized by an antibody, a region that is cleaved by trypsin and/or a potential glycosylation site with the glycosylation motif Asn-X-Ser/Thr. The second calcium binding motif commonly has the sequence LDRE, although variants of this sequence with conservative substitutions are also observed, including MDRE (SEQ ID NO:65), LDFE (SEQ ID NO:66), LDYE (SEQ ID NO:67), IDRE (SEQ ID NO:68), VDRE (SEQ ID NO:69) and IDFE (SEQ ID NO:70). Within most cadherin repeats, the third calcium binding motif has the sequence [L,I,V]-X-[L,I,V]-X-D-X-N-D-[N,H]-X-P (SEQ ID NO:72), wherein residues indicated in brackets may be any one of the recited residues. A preferred third calcium binding motif has the sequence DXNDN (SEQ ID NO:1), although one or both of the D residues may be replaced by an E. Homology among cadherin repeats is generally at least 20%, preferably at least 30%, as determined by the ALIGN algorithm (Myers and Miller, CABIOS 4:11-17, 1988). Most cadherins comprise at least five cadherin repeats, along with a hydrophobic domain that transverses the plasma membrane and, optionally, one or more cytoplasmic domains, as shown in FIGS. 1B-1AA. Occasionally, however, a cadherin may substitute an extracellular domain that contains fewer than three calcium binding motifs for one or more of the cadherin repeats. For example, as shown in FIG. 2, the second extracellular domain of LI-cadherin comprises only the first calcium binding motif (DXD).

[0096] As noted above, atypical, or type II, cadherins include cadherin-5 (VE-cadherin), cadherin-6 (K-cadherin), cadherin-7, cadherin-8, cadherin-11 (OB-cadherin), cadherin-12, cadherin-14, cadherin-15 and PB-cadherin. Types III-X include LI-cadherin, T-cadherin, protocadherins (e.g., protocadherins 42, 43 and 68), desmocollins (e.g., desmocollins 1, 2, 3 and 4), desmogleins (e.g., desmogleins 1 and 2), and cadherin-related neuronal receptors. The sequence of various extracellular domains of each of these nonclassical cadherins is shown in FIG. 2, and SEQ ID NOs: 4-43.

[0097] A nonclassical cadherin CAR sequence, as used herein, is an amino acid sequence that is present within in a naturally occurring nonclassical cadherin and that is capable of detectably modulating a nonclassical cadherin-mediated function, such as cell adhesion, as described herein. In other words, contacting a nonclassical cadherin-expressing cell with a peptide comprising a CAR sequence results in a detectable change in a nonclassical cadherin-mediated function using at least one of the representative assays provided herein. CAR sequences are generally recognized in vivo by a nonclassical cadherin or other adhesion molecule (i.e., a molecule that mediates cell adhesion via a receptor on the cell surface), and are necessary for maximal heterophilic and/or homophilic interaction. CAR sequences may be of any length, but generally comprise at least three amino acid residues, preferably 4-16 amino acid residues, and more preferably 5-9 amino acid residues. A peptide modulating agent may comprise any number of amino acid residues, but preferred agents comprise 3-50 residues, preferably 4-16 residues.

[0098] It has been found, within the context of the present invention, that certain nonclassical cadherin CAR sequences share the consensus sequence:

(SEQ ID NO:3)

Aaa-Phe-Baa-Ile/Leu/Val-Asp/Asn/Glu-Caa-Daa-Ser/
Thr/Asn-Gly

[0099] Within the consensus sequence, Aaa, Baa, Caa and Daa indicate independently selected amino acid residues; “Ile/Leu/Val” indicates an amino acid that is isoleucine, leucine or valine; “Asp/Asn/Glu” indicates an amino acid that is aspartic acid, asparagine or glutamic acid; and “Ser/Thr/Asn” indicates an amino acid that is serine, threonine or asparagine. Representative nonclassical cadherin CAR sequences are provided within Table I. CAR sequences specifically provided herein further include portions of such representative CAR sequences, as well as longer polypeptides that comprise at least a portion of such sequences. Additional nonclassical cadherin CAR sequences may be identified based on sequence homology to the nonclassical cadherin CAR sequences provided herein, and based on the ability of a peptide comprising such a sequence to modulate a nonclassical cadherin-mediated function within a representative assay described herein. Within certain embodiments, a modulating agent comprises at least three consecutive residues, preferably at least five consecutive residues and more preferably at least seven consecutive residues, of a nonclassical cadherin CAR sequence that satisfies the above consensus sequence.

TABLE I

Representative Nonclassical Cadherin
CAR Sequences

| | |
|---|---|
| Cadherin | CAR Sequence |

| | |
|---|---|
| Human OB-cadherin EC1 | FFVIEEYTG (SEQ ID NO:99) |
| Human OB-cadherin EC1 | IFVIDDKSG (SEQ ID NO:85) |
| Human OB-cadherin EC2 | YFSVEAQTG (SEQ ID NO:113) |
| Human cadherin-5 EC1 | VFRVDAETG (SEQ ID NO:127) |
| Human cadherin-6 EC1 | FFLLEEYTG (SEQ ID NO:154) |
| Human cadherin-6 EC1 | LFIINENTG (SEQ ID NO:141) |
| Human cadherin-6 EC2 | YFSVESETG (SEQ ID NO:168) |
| Human cadherin-6 EC4 | IFNIDSGNG (SEQ ID NO:182) |
| Chicken cadherin-7 EC1 | IFIIDENTG (SEQ ID NO:196) |
| Chicken cadherin-7 EC2 | YFSVEPKTG (SEQ ID NO:210) |
| Chicken cadherin-7 EC4 | YFNIDANSG (SEQ ID NO:224) |
| Human cadherin-8 EC1 | MFVLEEFSG (SEQ ID NO:252) |
| Humancadherin-8 EC1 | IFQINDVTG (SEQ ID NO:238) |
| Human cadherin-12 EC1 | VFTIDETTG (SEQ ID NO:266) |
| Humancadherin-12 EC2 | YFSIDPKTG (SEQ ID NO:280) |
| Humancadherin-14 EC1 | IFIIDDTTG (SEQ ID NO:294) |
| Human cadherin-14 EC2 | YFSVDPKTG (SEQ ID NO:308) |
| Human cadherin-14 EC4 | FFNIDANTG (SEQ ID NO:319) |
| Humancadherin-15 EC1 | VFSIDKFTG (SEQ ID NO:333) |
| Humancadherin-15 EC2 | LFSIDELTG (SEQ ID NO:347) |
| Human T-cadherin EC1 | IFRINENTG (SEQ ID NO:361) |
| RatPB-cadherin EC1 | FFVVEEYTG (SEQ ID NO:375) |
| RatPB-cadherin EC1 | IFLIDELTG (SEQ ID NO:389) |
| Rat PB-cadherin EC2 | HFTVDPKTG (SEQ ID NO:403) |
| RatPB-cadherin EC4 | IFDIDADTG (SEQ ID NO:417) |
| Human LI-cadherin EC2 | YFQINNKTG (SEQ ID NO:431) |
| Human protocadherin 43 | LFALDLVTG (SEQ ID NO:445) |
| EC3 | |
| Human protocadherin 43 | YFTINRDNG (SEQ ID NO:459) |
| EC5 | |
| Human protocadherin 68 | LFSIDPKTG (SEQ ID NO:473) |
| EC3 | |
| Human protocadherin 68 | LFEIDPSSG (SEQ ID NO:489) |
| EC6 | |
| Human desmoglein1 EC1 | IFVINQKTG (SEQ ID NO:503) |
| Human desmoglein1 EC2 | MFIINRNTG (SEQ ID NO:517) |
| Human desmoglein2 EC2 | VFYLNKDTG (SEQ ID NO:531) |
| Human desmocollin1 EC1 | LFYIEKDTG (SEQ ID NO:545) |
| Human desmocollin2 EC1 | LFYVERDTG (SEQ ID NO:559) |
| Human desmocollin ¾ | LFYIERDTG (SEQ ID NO:571) |
| EC1 | |
| Mouse Cnr1 EC3 | KFHIDPVSG (SEQ ID NO:585) |
| Mouse Cnr2 EC3 | QFSIDADTG (SEQ ID NO:599) |
| Mouse Cnr3 EC3 | TFHIDSVSG (SEQ ID NO:613) |
| Mouse Cnr5 EC3 | AFNIDSNSG (SEQ ID NO:627) |
| Mouse Cnr6 EC3 | KFTIDSSSG (SEQ ID NO:641) |
| Mouse Cnr7 EC3 | LFTLDEKNG (SEQ ID NO:655) |
| Mouse Cnr8 EC3 | KFLINEKTG (SEQ ID NO:4052) |
| CONSENSUS | xFxidxxtG (SEQ ID NO:3) |
| | v n s |
| | l e n |

[0100] Nonclassical cadherin CAR sequences are generally physically located within the cadherin molecule in or near the binding site of an adhesion molecule (i.e., within 10 amino acids, and preferably within 5 amino acids). The location of a binding site may generally be determined using well known techniques, such as evaluating the ability of a portion of the nonclassical cadherin to bind to the same nonclassical cadherin or to another adhesion molecule. Any standard binding assay may be employed for such an evaluation. Recognition of a CAR sequence by the nonclassical cadherin or other adhesion molecule results in a measurable effect on an adhesion molecule function, such as cell adhesion. Peptides comprising a CAR sequence generally inhibit such a function unless linked, as described herein, to form an enhancer of adhesion molecule function.

[0101] Certain preferred nonclassical cadherin CAR sequences comprise 3-9 or 5-7 amino acid residues of a sequence provided in Table I. Representative CAR sequences for nonclassical cadherins are provided below.

[0102] For example, a cadherin-6 CAR sequence may comprise one or more of the sequences: NEN, INEN (SEQ ID NO128), NENT (SEQ ID NO:129), IINEN (SEQ ID NO:130), INENT (SEQ ID NO:131), IINENT (SEQ ID NO:132), NENTG (SEQ ID NO:133), INENTG (SEQ ID NO:134), IINENTG (SEQ ID NO:135), FIINEN (SEQ ID NO:136), FIINENT (SEQ ID NO:137), FIINENTG (SEQ ID NO:138), LFIINEN (SEQ ID NO:139), LFIINENT (SEQ ID NO:140), LFIINENTG (SEQ ID NO:141), EEY, EEYT (SEQ ID NO:142), EEYTG (SEQ ID NO:143), LEEY (SEQ ID NO:144), LEEYT (SEQ ID NO:145), LEEYTG (SEQ ID NO:146), LLEEY (SEQ ID NO:147), LLEEYTG (SEQ ID NO:148), FLLEEY (SEQ ID NO:149), FLLEEYT (SEQ ID NO:150), FLLEEYTG (SEQ ID NO:151), FFLLEEY (SEQ ID NO:152), FFLLEEYT (SEQ ID NO:153), FFLLEEYTG (SEQ ID NO:154), ESE, ESET (SEQ ID NO:155), ESETG (SEQ ID NO:156), VESE (SEQ ID NO:157), VSEST (SEQ ID NO:158), VESETG (SEQ ID NO:159), SVESE (SEQ ID NO:160), SVESET (SEQ ID NO:161), SVESETG (SEQ ID NO:162), FSVESE (SEQ ID NO:163), FSVESET (SEQ ID NO:164), FSVESETG (SEQ ID NO:165), YFSVESE (SEQ ID NO:166), YFSVESET (SEQ ID NO:167), YFSVESETG (SEQ ID NO:168), DSG, DSGN (SEQ ID NO:169), DSGNG (SEQ ID NO:170), IDSG (SEQ ID NO:171), IDSGN (SEQ ID NO:172), IDSGNG (SEQ ID NO:173), NIDSG (SEQ ID NO:174), NIDSGN (SEQ ID NO:175), NIDSGNG (SEQ ID NO:176), FNIDSG (SEQ ID NO:177), FNIDSGN (SEQ ID NO:178), FNIDSGNG (SEQ ID NO:179), IFNIDSG (SEQ ID NO:180), IFNIDSGN (SEQ ID NO:181) or IFNIDSGNG (SEQ ID NO:182). Linear peptides having such sequences may be modified at the N- and/or C-termini, as in the peptides N-Ac-FFLLEEYTG-NH₂ (SEQ ID NO:154), N-Ac-LFIINENTG-NH₂ (SEQ ID NO:141), N-Ac-YFSVESETG-NH₂ (SEQ ID NO:168) and N-Ac-IFNIDSGNG-NH₂ (SEQ ID NO:182).

[0103] A cadherin-7 CAR sequence may comprise, for example, one or more of the sequences: DEN, IDEN (SEQ ID NO:183), DENT (SEQ ID NO:184), IIDEN (SEQ ID NO:185), IDENT (SEQ ID NO:186), IIDENT (SEQ ID NO:187), DENTG (SEQ ID NO:188), IDENTG (SEQ ID NO:189), IIDENTG (SEQ ID NO:190), FIIDEN (SEQ ID NO:191), FIIDENT (SEQ ID NO:192), FIIDENTG (SEQ ID NO:193), IFIIDEN (SEQ ID NO:194), IFIIDENT (SEQ ID NO:195), IFIIDENTG (SEQ ID NO:196), EPK, EPKT (SEQ ID NO:197), EPKTG (SEQ ID NO:198), VEPK (SEQ ID NO:199), VEPKT (SEQ ID NO:200), VEPKTG (SEQ ID NO:201), SVEPK (SEQ ID NO:202), SVEPKT (SEQ ID NO:203), SVEPKTG (SEQ ID NO:204), FSVEPK (SEQ ID NO:205), FSVEPKT (SEQ ID NO:206), FSVEPKTG (SEQ ID NO:207), YFSVEPK (SEQ ID NO:208), YFSVEPKT (SEQ ID NO:209), YFSVEPKTG (SEQ ID NO:210), DAN, DANS (SEQ ID NO:211), DANSG (SEQ ID NO:212), IDAN (SEQ ID NO:213), IDANS (SEQ ID NO:214), IDANSG (SEQ ID NO:215), NIDAN (SEQ ID NO:216), NIDANS (SEQ ID NO:217), NIDANSG (SEQ ID NO:218), FNIDAN (SEQ ID NO:219), FNIDANS (SEQ ID NO:220), FNIDANSG (SEQ ID NO:221), YFNIDAN (SEQ ID NO:222), YFNIDANS (SEQ ID NO:223) or YFNIDANSG (SEQ ID NO:224). Linear peptides having such sequences may be modified at the N- and/or C-termini, as in the peptides N-Ac-IFIIDENTG-NH₂ (SEQ ID NO:196), N-Ac-YFSVEPKTG-NH₂ (SEQ ID NO:210) and N-Ac-YFNIDANSG-NH₂ (SEQ ID NO:224).

[0104] A cadherin-8 CAR sequence may comprise, for example, one or more of the sequences: NDV, INDV (SEQ ID NO:225), NDVT (SEQ ID NO:226), QINDV (SEQ ID NO:227), INDVT (SEQ ID NO:228), QINDVT (SEQ ID NO:229), NDVTG (SEQ ID NO:230), INDVTG (SEQ ID NO:231), QINDVTG (SEQ ID NO:232), FQINDV (SEQ ID NO:233), FQINDVT (SEQ ID NO:234), FQINDVTG (SEQ ID NO:235), IFQINDV (SEQ ID NO:236), IFQINDVT (SEQ ID NO:237), IFQINDVTG (SEQ ID NO:238), EEF, EEFS (SEQ ID NO:239), EEFSG (SEQ ID NO:240), LEEF (SEQ ID NO:241), LEEFS (SEQ ID NO:242), LEEFSG (SEQ ID NO:243), VLEEF (SEQ ID NO:244), VLEEFS (SEQ ID NO:245), VLEEFSG (SEQ ID NO:247), FVLEEF (SEQ ID NO:247), FVLEEFS (SEQ ID NO:248), FVLEEFSG (SEQ ID NO:249), MFVLEEF (SEQ ID NO:250), MFVLEEFS (SEQ ID NO:251) or MFVLEEFSG (SEQ ID NO:252). Linear peptides having such sequences may be modified at the N- and/or C-termini, as in the peptides N-Ac-MFVLEEFSG-NH₂ (SEQ ID NO:252) and N-Ac-IFQINDVTG-NH₂ (SEQ ID NO:238).

[0105] A cadherin-12 CAR sequence may comprise, for example, one or more of the sequences: DET, IDET (SEQ ID NO:253), DETT (SEQ ID NO:254), TIDET (SEQ ID NO:255), IDETT (SEQ ID NO:256), TIDETT (SEQ ID NO:257), DETTG (SEQ ID NO:258), IDETTG (SEQ ID NO:259), TIDETTG (SEQ ID NO:260), FTIDET (SEQ ID NO:261), FTIDETT (SEQ ID NO:262), FTIDETTG (SEQ ID NO:263), VFTIDET (SEQ ID NO:264), VFTIDETT (SEQ ID NO:265), VFTIDETTG (SEQ ID NO:266), DPK, DPKT (SEQ ID NO:267), DPKTG (SEQ ID NO:268), IDPK (SEQ ID. NO:269), IDPKT (SEQ ID NO:270), IDPKTG (SEQ ID NO:271), SIDPK (SEQ ID NO:272), SIDPKT (SEQ ID NO:273), SIDPKTG (SEQ ID NO:274), FSIDPK (SEQ ID NO:275), FSIDPKT (SEQ ID NO:276), FSIDPKTG (SEQ ID NO:277), YFSIDPK (SEQ ID NO:278), YFSIDPKT (SEQ ID NO:279) or YFSIDPKTG (SEQ ID NO:280). Linear peptides having such sequences may be modified at the N- and/or C-termini, as in the peptides N-Ac-VFTIDETTG-NH₂ (SEQ ID NO:266) and N-Ac-YFSIDPKTG-NH₂ (SEQ ID NO:280).

[0106] A cadherin-14 CAR sequence may comprise, for example, one or more of the sequences: DDT, IDDT (SEQ ID NO:281), DDTT (SEQ ID NO:282), IIDDT (SEQ ID NO:283), IDDTT (SEQ ID NO:284), IIDDTT (SEQ ID NO:285), DDTTG (SEQ ID NO:286), IDDTTG (SEQ ID NO:287), IIDDTTG (SEQ ID NO:288), FIIDDT (SEQ ID NO:289), FIIDDTT (SEQ ID NO:290), FIIDDTTG (SEQ ID NO:291), IFIIDDT (SEQ ID NO:292), IFIIDDTT (SEQ ID NO:293), IFIIDDTTG (SEQ ID NO:294), DPK, DPKT (SEQ ID NO:295), DPKTG (SEQ ID NO:296), VDPK (SEQ ID NO:297), VDPKT (SEQ ID NO:298), VDPKTG (SEQ ID NO:299), SVDPK (SEQ ID NO:300), SVDPKT (SEQ ID NO:301), SVDPKTG (SEQ ID NO:302), FSVDPK (SEQ ID NO:303), FSVDPKT (SEQ ID NO:304), FSVDPKTG (SEQ ID NO:305), YFSVDPK (SEQ ID NO:306), YFSVDPKT (SEQ ID NO:307), YFSVDPKTG (SEQ ID NO:308), DAN, DANT (SEQ ID NO:309), DANTG (SEQ ID NO:310), IDANT (SEQ ID NO:311), IDANTG (SEQ ID NO:312), NIDANT (SEQ ID NO:313), NIDANTG (SEQ ID NO:314), FNIDANT (SEQ ID NO:315), FNIDANTG (SEQ ID NO:316), FFNIDAN (SEQ ID NO:317), FFNIDANT (SEQ ID NO:318) or FFNIDANTG (SEQ ID NO:319). Linear peptides having such sequences may be modified at the N- and/or C-termini, as in the peptides N-Ac-IFIIDDTTG-NH₂ (SEQ ID NO:294), N-Ac-YFSVDPKTG-NH₂ (SEQ ID NO:308) and N-Ac-FFNIDANTG-NH₂ (SEQ ID NO:319).

[0107] A cadherin-15 CAR sequence may comprise, for example, one or more of the sequences: DKF, IDKF (SEQ ID NO:320), DKFT (SEQ ID NO:321), SIDKF (SEQ ID NO:322), IDKFT (SEQ ID NO:323), SIDKFT (SEQ ID NO:324), DKFTG (SEQ ID NO:325), IDKFTG (SEQ ID NO:326), SIDKFTG (SEQ ID NO:327), FSIDKF (SEQ ID NO:328), FSIDKFT (SEQ ID NO:329), FSIDKFTG (SEQ ID NO:330), VFSIDKF (SEQ ID NO:331), VFSIDKFT (SEQ ID NO:332), VFSIDKFTG (SEQ ID NO:333), DEL, DELT (SEQ ID NO:334), DELTG (SEQ ID NO:335), IDEL (SEQ ID NO:336), IDELT (SEQ ID NO:337), IDELTG (SEQ ID NO:338), SIDEL (SEQ ID NO:339), SIDELT (SEQ ID NO:340), SIDELTG (SEQ ID NO:341), FSIDEL (SEQ ID NO:342), FSIDELT (SEQ ID NO:343), FSIDELTG (SEQ ID NO:344), LFSIDEL (SEQ ID NO:345), LFSIDELT (SEQ ID NO:346) or LFSIDELTG (SEQ ID NO:347). Linear peptides having such sequences may be modified at the N- and/or C-termini, as in the peptides N-Ac-VFSIDKFTG-NH₂ (SEQ ID NO:333) and N-Ac-LFSIDELTG-NH₂ (SEQ ID NO:347).

[0108] A T-cadherin CAR sequence may comprise, for example, one or more of the sequences: NEN, INEN (SEQ ID NO:348), NENT (SEQ ID NO:349), RINEN (SEQ ID NO:350), INENT (SEQ ID NO:351), RINENT (SEQ ID NO:352), NENTG (SEQ ID NO:353), INENTG (SEQ ID NO:354), RINENTG (SEQ ID NO:355), FRINEN (SEQ ID NO:356), FRINENT (SEQ ID NO:357), FRINENTG (SEQ ID NO:358), IFRINEN (SEQ ID NO:359), IFRINENT (SEQ ID NO:360) or IFRINENTG (SEQ ID NO:361). Linear peptides having such sequences may be modified at the N- and/or C-termini, as in the peptide N-Ac-IFRINENTG-NH₂ (SEQ ID NO:361).

[0109] A PB-cadherin CAR sequence may comprise, for example, one or more of the sequences: EEY, EEYT (SEQ ID NO:362), EEYTG (SEQ ID NO:363), VEEY (SEQ ID NO:364), VEEYT (SEQ ID NO:365), VEEYTG (SEQ ID NO:366), VVEEY (SEQ ID NO:367), VVEEYT (SEQ ID NO:368), VVEEYTG (SEQ ID NO:369), FVVEEY (SEQ ID NO:370), FVEEYT (SEQ ID NO:371), FVEEYTG (SEQ ID NO:372), FFVVEEY (SEQ ID NO:373), FFVVEEYT (SEQ ID NO:374), FFVVEEYTG (SEQ ID NO:375), DEL, DELT (SEQ ID NO:376), DELTG (SEQ ID NO:377), IDEL (SEQ ID NO:378), IDELT (SEQ ID NO:379), IDELTG (SEQ ID NO:380), LIDEL (SEQ ID NO:381), LIDELT (SEQ ID NO:382), LIDELTG (SEQ ID NO:383), FLIDEL (SEQ ID NO:384), FLIDELT (SEQ ID NO:385), FLIDELTG (SEQ ID NO:386), IFLIDEL (SEQ ID NO:387), IFLIDELT (SEQ ID NO:388), IFLIDELTG (SEQ ID NO:389), DPK, DPKT (SEQ ID NO:390), DPKTG (SEQ ID NO:391), VDPK (SEQ ID NO:392), VDPKT (SEQ ID NO:393), VDPKTG (SEQ ID NO:394), TVDPK (SEQ ID NO:395), TVDPKT (SEQ ID NO:396), TVDPKTG (SEQ ID NO:397), FTVDPK (SEQ ID NO:398), FTVDPKT (SEQ ID NO:399), FTVDPKTG (SEQ ID NO:400), HFTVDPK (SEQ ID NO:401), HFTVDPKT (SEQ ID NO:402), HFTVDPKTG (SEQ ID NO:403), DAD, DADT (SEQ ID NO:404), DADTG (SEQ ID NO:405), IDAD (SEQ ID NO:406), IDADT (SEQ ID NO:407), IDADTG (SEQ ID NO:408), DIDAD (SEQ ID NO:409), DIDADT (SEQ ID NO:410), DIDADTG (SEQ ID NO:411), FDIDAD (SEQ ID NO:412), FDIDADT (SEQ ID NO:413), FDIDADTG (SEQ ID NO:414), IFDIDAD (SEQ ID NO:415), IFDIDADT (SEQ ID NO:416) or IFDIDADTG (SEQ ID NO:417). Linear peptides having such sequences may be modified at the N- and/or C-termini, as in the peptides N-Ac-FFVVEEYTG-NH₂ (SEQ ID NO:375), N-Ac-IFLIDELTG-NH₂ (SEQ ID NO:389), N-Ac-HFTVDPKTG-NH₂ (SEQ ID NO:403) and N-Ac-IFDIDADTG-NH₂ (SEQ ID NO:417).

[0110] A LI-cadherin CAR sequence may comprise, for example, one or more of the sequences: NNK, NNKT (SEQ ID NO:418), NNKTG (SEQ ID NO:419), INNK (SEQ ID NO:420), INNKT (SEQ ID NO:421), INNKTG (SEQ ID NO:422), QINNK (SEQ ID NO:423), QINNKT (SEQ ID NO:424), QINNKTG (SEQ ID NO:425), FQINNK (SEQ ID NO:426), FQINNKT (SEQ ID NO:427), FQINNKTG (SEQ ID NO:428), YFQINNK (SEQ ID NO:429), YFQINNKT (SEQ ID NO:430) or YFQINNKTG (SEQ ID NO:431). Linear peptides having such sequences may be modified at the N- and/or C-termini, as in the peptide N-Ac-YFQINNKTG-NH₂ (SEQ ID NO:431).

[0111] A protocadherin CAR sequence may comprise, for example, one or more of the sequences: DLV, DLVT (SEQ ID NO:432), DLVTG (SEQ ID NO:433), LDLV (SEQ ID NO:434), LDLVT (SEQ ID NO:435), LDLVTG (SEQ ID NO:436), ALDLV (SEQ ID NO:437), ALDLVT (SEQ ID NO:438), ALDLVTG (SEQ ID NO:439), FALDLV (SEQ ID NO:440), FALDLVT (SEQ ID NO:441), FALDLVTG (SEQ ID NO:442), LFALDLV (SEQ ID NO:443), LFALDLVT (SEQ ID NO:444), LFALDLVTG (SEQ ID NO:445), NRD, NRDN (SEQ ID NO:446), NRDNG (SEQ ID NO:447), INRD (SEQ ID NO:448), INRDN (SEQ ID NO:449), INRDNG (SEQ ID NO:450), TINRD (SEQ ID NO:451), TINRDN (SEQ ID NO:452), TINRDNG (SEQ ID NO:453), FTINRD (SEQ ID NO:454), FTINRDN (SEQ ID NO:455), FTINRDNG (SEQ ID NO:456), YFTINRD (SEQ ID NO:457), YFTINRDN (SEQ ID NO:458), YFTINRDNG (SEQ ID NO:459), DPK, DPKT (SEQ ID NO:460), DPKTG (SEQ ID NO:461), IDPK (SEQ ID NO:462), IDPKT (SEQ ID NO:463), IDPKTG (SEQ ID NO:464), SIDPK (SEQ ID NO:465), SIDPKT (SEQ ID NO:466), SIDPKTG (SEQ ID NO:467), FSIDPK (SEQ ID NO:468), FSIDPKT (SEQ ID NO:469), FSIDPKTG (SEQ ID NO:470), LFSIDPK (SEQ ID NO:471), LFSIDPKT (SEQ ID NO:472), LFSIDPKTG (SEQ ID NO:473), DPS, DPSS (SEQ ID NO:474), DPSSG (SEQ ID NO:475), IDPS (SEQ ID NO:476), IDPSS (SEQ ID NO:477), IDPSSG (SEQ ID NO:478), EIDPS (SEQ ID NO:479), EIDPSS (SEQ ID NO:480), EIDPSSG (SEQ ID NO:481), FEIDPS (SEQ ID NO:482), FEIDPSS (SEQ ID NO:483), FEIDPS (SEQ ID NO:484), FEIDPSS (SEQ ID NO:485), FEIDPSSG (SEQ ID NO:486), LFEIDPS (SEQ ID NO:487), LFEIDPSS (SEQ ID NO:488) or LFEIDPSSG (SEQ ID NO:489). Linear peptides having such sequences may be modified at the N- and/or C-termini, as in the peptides N-Ac-LFALDLVTG-NH₂ (SEQ ID NO:445), N-Ac-YFTINRDNG-NH₂ (SEQ ID NO:459), N-Ac-LFSIDPKTG-NH₂ (SEQ ID NO:473) and N-Ac-LFEIDPSSG-NH₂ (SEQ ID NO:489).

[0112] A desmoglein CAR sequence may comprise, for example, one or more of the sequences: NQK, NQKT (SEQ ID NO:490), NQKTG (SEQ ID NO:491), INQK (SEQ ID NO:492), INQKT (SEQ ID NO:493), INQKTG (SEQ ID NO:494), VINQK (SEQ ID NO:495), VINQKT (SEQ ID NO:496), VINQKTG (SEQ ID NO:497), FVINQK (SEQ ID NO:498), FVINQKT (SEQ ID NO:499), FVINQKTG (SEQ ID NO:500), IFVINQK (SEQ ID NO:501), IFVINQKT (SEQ ID NO:502), IFVINQKTG (SEQ ID NO:503), NRN, NRNT (SEQ ID NO:504), NRNTG (SEQ ID NO:505), INRN (SEQ ID NO:506), INRNT (SEQ ID NO:507), INRNTG (SEQ ID NO:508), IINRN (SEQ ID NO:509), IINRNT (SEQ ID NO:510), IINRNTG (SEQ ID NO:511), FIINRN (SEQ ID NO:512), FIINRNT (SEQ ID NO:513), FIINRNTG (SEQ ID NO:514), MFIINRN (SEQ ID NO:515), MFIINRNT (SEQ ID NO:516), MFIINRNTG (SEQ ID NO:517), NKD, NKDT (SEQ ID NO:518), NKDTG (SEQ ID NO:519), LNKD (SEQ ID NO:520), LNKDT (SEQ ID NO:521), LNKDTG (SEQ ID NO:522), YLNKD (SEQ ID NO:523), YLNKDT (SEQ ID NO:524), YLNKDTG (SEQ ID NO:525), FYLNKD (SEQ ID NO:526), FYLNKDT (SEQ ID NO:527), FYLNKDTG (SEQ ID NO:528), VFYLNKD (SEQ ID NO:529), VFYLNKDT (SEQ ID NO:530) or VFYLNKDTG (SEQ ID NO:531). Linear peptides having such sequences may be modified at the N- and/or C-termini, as in the peptides N-Ac-IFVINQKTG-NH₂ (SEQ ID NO:503), N-Ac-MFIINRNTG-NH₂ (SEQ ID NO:517) and N-Ac-VFYLNKDTG-NH₂ (SEQ ID NO:531).

[0113] A desmocollin CAR sequence may comprise, for example, one or more of the sequences EKD, EKDT (SEQ ID NO:532), EKDTG (SEQ ID NO:533), IEKD (SEQ ID NO:534), IEKDT (SEQ ID NO:535), IEKDTG (SEQ ID NO:536), YIEKD (SEQ ID NO:537), YIEKDT (SEQ ID NO:538), YIEKDTG (SEQ ID NO:539), FYIEKD (SEQ ID NO:540), FYIEKDT (SEQ ID NO:541), FYIEKDTG (SEQ ID NO:542), LFYIEKD (SEQ ID NO:543), LFYIEKDT (SEQ ID NO:544), LFYIEKDTG (SEQ ID NO:545), ERD, ERDT (SEQ ID NO:546), ERDTG (SEQ ID NO:547), VERD (SEQ ID NO:548), VERDT (SEQ ID NO:549), VERDTG (SEQ ID NO:550), YVERD (SEQ ID NO:551), YVERDT (SEQ ID NO:552), YVERDTG (SEQ ID NO:553), FYVERD (SEQ ID NO:554), FYVERDT (SEQ ID NO:555), FYVERDTG (SEQ ID NO:556), LFYVERD (SEQ ID NO:557), LFYVERDT (SEQ ID NO:558), LFYVERDTG (SEQ ID NO:559), IERD (SEQ ID NO:560), IERDT (SEQ ID NO:561), IERDTG (SEQ ID NO:562), YIERD (SEQ ID NO:563), YIERDT (SEQ ID NO:564), YIERDTG (SEQ ID NO:565), FYIERD (SEQ ID NO:566), FYIERDT (SEQ ID NO:567), FYIERDTG (SEQ ID NO:568), LFYIERD (SEQ ID NO:569), LFYIERDT (SEQ ID NO:570) or LFYIERDTG (SEQ ID NO:571). Linear peptides having such sequences may be modified at the N- and/or C-termini, as in the peptides N-Ac-LFYIEKDTG-NH₂ (SEQ ID NO:545), N-Ac-LFYVERDTG-NH₂ (SEQ ID NO:559) and N-Ac-LFYIERDTG-NH₂ (SEQ ID NO:571).

[0114] A desmoglein-1 CAR sequence may comprise, for example, one or more of the sequences RAL, RALN (SEQ ID NO: 4053), RALNS (SEQ ID NO: 4054), RALNSM (SEQ ID NO: 4055), RALNSL (SEQ ID NO: 4056), RALNSMG (SEQ ID NO: 4057), RALNSLG (SEQ ID NO: 4058), CRAL (SEQ ID NO: 4059), CRALN (SEQ ID NO: 4060), CRALNS (SEQ ID NO: 4061), CRALNSM (SEQ ID NO: 4062), CRALNSL (SEQ ID NO: 4063), CRALNSMG (SEQ ID NO: 4064), CRALNSLG (SEQ ID NO: 4065), YCRAL (SEQ ID NO: 4066), YCRALN (SEQ ID NO: 4067), YCRALNS (SEQ ID NO: 4068), YCRALNSM (SEQ ID NO: 4069), YCRALNSL (SEQ ID NO: 4070), YCRALNSMG (SEQ ID NO: 4071), YCRALNSLG (SEQ ID NO: 4072), IYRAL (SEQ ID NO: 4073), IYRALN (SEQ ID NO: 4074), IYRALNS (SEQ ID NO: 4075), IYRALNSM (SEQ ID NO: 4076), IYRALNSL (SEQ ID NO: 4077), IYRALNSMG (SEQ ID NO: 4078) or IYRALNSLG (SEQ ID NO: 4079). Linear peptides having such sequences may be modified at the N- and/or C-termini, as in the peptides N-Ac-IYRALNSMG-NH₂ (SEQ ID NO:4080) and N-Ac-IYRALNSLG-NH₂ (SEQ ID NO: 4081).

[0115] A desmoglein-2 CAR sequence may comprise, for example, one or more of the sequences YAL, YALD (SEQ ID NO: 4082), YALDA (SEQ ID NO:1 4083), YALDAR (SEQ ID NO: 4084), YALDARG (SEQ ID NO: 4085), GYAL (SEQ ID NO: 4086), GYALD (SEQ ID NO: 4087), GYALDA (SEQ ID NO: 4088), GYALDAR (SEQ ID NO: 4089), GYALDARG (SEQ ID NO: 4090), TGYAL (SEQ ID NO: 4091), TGYALD (SEQ ID NO: 4092), TGYALDA (SEQ ID NO: 4093), TGYALDAR (SEQ ID NO: 4094), TGYALDARG (SEQ ID NO: 4095), LTGYAL (SEQ ID NO: 4096), LTGYALD (SEQ ID NO: 4097), LTGYALDA (SEQ ID NO: 4098), LTGYALDAR (SEQ ID NO: 4099), or LTGYALDARG (SEQ ID NO: 4100). Linear peptides having such sequences may be modified at the N- and/or C-termini, as in the peptides N-Ac-LTGYALDARG-NH₂ (SEQ ID NO: 4101).

[0116] A desmoglein-3 CAR sequence may comprise, for example, one or more of the sequences RAL, RALN (SEQ ID NO: 4082), RALNA (SEQ ID NO: 4102), RALNAQ (SEQ ID NO: 4103), RALNAL (SEQ ID NO: 4104), RALNAQG (SEQ ID NO: 4105), RALNALG (SEQ ID NO: 4106), CRAL (SEQ ID NO: 4107), CRALN (SEQ ID NO: 4108), CRALNA (SEQ ID NO: 4109), CRALNAQ (SEQ ID NO: 4110), CRALNAL (SEQ ID NO: 4111), CRALNAQG (SEQ ID NO: 4112), CRALNALG (SEQ ID NO: 4113), TCRAL (SEQ ID NO: 4114), TCRALN (SEQ ID NO: 4115), TCRALNA (SEQ ID NO: 4116), TCRALNAQ (SEQ ID NO: 4117), TCRALNAL (SEQ ID NO: 4118), TCRALNAQG (SEQ ID NO: 4119), TCRALNALG (SEQ ID NO: 4120), ITCRAL (SEQ ID NO: 4121), ITCRALN (SEQ ID NO: 4122), ITCRALNA (SEQ ID NO: 4123), ITCRALNAQ (SEQ ID NO: 4124), ITCRALNAL (SEQ ID NO: 4125), ITCRALNAQG (SEQ ID NO: 4126), or ITCRALNALG (SEQ ID NO: 4127). Linear peptides having such sequences may be modified at the N- and/or C-termini, as in the peptides N-Ac-ITCRALNAQG-NH₂ (SEQ ID NO: 4128) and N-Ac-ITCRALNALG-NH₂ (SEQ ID NO: 4129).

[0117] A desmocollin-1 CAR sequence may comprise, for example, one or more of the sequences YAT, YATT (SEQ ID NO: 4130), YATTA (SEQ ID NO: 4131), YATTAD (SEQ ID NO: 4132), YATTADG (SEQ ID NO: 4133), GYAT (SEQ ID NO: 4134), GYATT (SEQ ID NO: 4135), GYATTA (SEQ ID NO: 4136), GYATTAD (SEQ ID NO: 4137), GYATTADG (SEQ ID NO: 4138), AYAT (SEQ ID NO: 4139), AYATT (SEQ ID NO: 4140), AYATTA (SEQ ID NO: 4141), AYATTAD (SEQ ID NO: 4142), AYATTADG (SEQ ID NO: 4143), YGYAT (SEQ ID NO: 4144), YGYATT (SEQ ID NO: 4145), YGYATTA (SEQ ID NO: 4146), YGYATTAD (SEQ ID NO: 4147), YGYATTADG (SEQ ID NO: 4148), YAYAT (SEQ ID NO: 4149), YAYATT (SEQ ID NO: 4150), YAYATTA (SEQ ID NO: 4151), YAYATTAD (SEQ ID NO: 4152), YAYATTADG (SEQ ID NO: 4153), LYGYAT (SEQ ID NO: 4154), LYGYATT (SEQ ID NO: 4155), LYGYATTA (SEQ ID NO: 4156), LYGYATTAD (SEQ ID NO: 4157), LYGYATTADG (SEQ ID NO: 4158), LYAYAT (SEQ ID NO: 4159), LYAYATT (SEQ ID NO: 4160), LYAYATTA (SEQ ID NO: 4161), LYAYATTAD (SEQ ID NO: 4162), LYAYATTADG (SEQ ID NO: 4163), VYGYAT (SEQ ID NO: 4164), VYGYATT (SEQ ID NO: 4165), VYGYATTA (SEQ ID NO: 4166), VYGYATTAD (SEQ ID NO: 4167), VYGYATTADG (SEQ ID NO: 4168), VYAYAT (SEQ ID NO: 4169), VYAYATT (SEQ ID NO: 4170), VYAYATTA (SEQ ID NO: 4171), VYAYATTAD (SEQ ID NO: 4172), VYAYATTADG (SEQ ID NO: 4173), IYGYAT (SEQ ID NO: 4174), IYGYATT (SEQ ID NO: 4175), IYGYATTA (SEQ ID NO: 4176), IYGYATTAD (SEQ ID NO: 4177), IYGYATTADG (SEQ ID NO: 4178), IYAYAT (SEQ ID NO: 4179), IYAYATT (SEQ ID NO: 4180), IYAYATTA (SEQ ID NO: 4181), IYAYATTAD (SEQ ID NO: 4182) or IYAYATTADG (SEQ ID NO: 4183). Linear peptides having such sequences may be modified at the N- and/or C-termini, as in the peptides N-Ac-LYGYATTADG-NH₂ (SEQ ID NO: 4184) N-Ac-LYAYATTADG-NH₂ (SEQ ID NO: 4185) N-Ac-VYGYATTADG-NH₂ (SEQ ID NO: 4186) N-Ac-VYAYATTADG-NH₂ (SEQ ID NO: 4187) N-Ac-IYGYATTADG-NH₂ (SEQ ID NO: 4188) and N-Ac-IYAYATTADG-NH₂ (SEQ ID NO: 4189).

[0118] A desmocollin-2 CAR sequence may comprise, for example, one or more of the sequences FAT, FATT (SEQ ID NO: 4190), FATTP (SEQ ID NO: 4191), FATTPD (SEQ ID NO: 4192), FATTPDG (SEQ ID NO: 4193), AFAT (SEQ ID NO: 4194), AFATT (SEQ ID NO: 4195), AFATTP (SEQ ID NO: 4196), AFATTPD (SEQ ID NO: 4197), AFATTPDG (SEQ ID NO: 4198), IAFAT (SEQ ID NO: 4199), IAFATT (SEQ ID NO: 4200), IAFATTP (SEQ ID NO: 4201), IAFATTPD (SEQ ID NO: 4202), IAFATTPDG (SEQ ID NO: 4203), IIAFAT (SEQ ID NO: 4204), IIAFATT (SEQ ID NO: 4205), IIAFATTP (SEQ ID NO: 4206), IIAFATTPD (SEQ ID NO: 4207), IIAFATTPDG (SEQ ID NO: 4208), LIAFAT (SEQ ID NO: 4209), LIAFATT (SEQ ID NO: 4210), LIAFATTP (SEQ ID NO: 4211), LIAFATTPD (SEQ ID NO: 4212) or LIAFATTPDG (SEQ ID NO: 4213). Linear peptides having such sequences may be modified at the N- and/or C-termini, as in the peptides N-Ac-IIAFATTPDG-NH₂ (SEQ ID NO: 4214) and N-Ac-LIAFATTPDG-NH₂ (SEQ ID NO: 4215).

[0119] A desmocollin-3 or desmocollin-4 CAR sequence may comprise, for example, one or more of the sequences YAS, YAST (SEQ ID NO: 4216), YASTA (SEQ ID NO: 4217), YASTAD (SEQ ID NO: 4218), YASTADG (SEQ ID NO: 4219), AYAS (SEQ ID NO: 4220), AYAST (SEQ ID NO: 4221), AYASTA (SEQ ID NO: 4222), AYASTAD (SEQ ID NO: 4223), AYASTADG (SEQ ID NO: 4224), IAYAS (SEQ ID NO: 4225), IAYAST (SEQ ID NO: 4226), IAYASTA (SEQ ID NO: 4227), IAYASTAD (SEQ ID NO: 4228), IAYASTADG (SEQ ID NO: 4229), LIAYAS (SEQ ID NO: 4230), LIAYAST (SEQ ID NO: 4231), LIAYASTA (SEQ ID NO: 4232), LIAYASTAD (SEQ ID NO: 4233) or LIAYASTADG (SEQ ID NO: 4234). Linear peptides having such sequences may be modified at the N- and/or C-termini, as in the peptides N-Ac-LIAYASTADG-NH₂ (SEQ ID NO: 4235).

[0120] A cadherin-related neuronal receptor (cnr) CAR sequence may comprise, for example, one or more of the sequences: DPV, DPVS (SEQ ID NO:572), DPVSG (SEQ ID NO:573), IDPV (SEQ ID NO:574), IDPVS (SEQ ID NO:575), IDPVSG (SEQ ID NO:576), HIDPV (SEQ ID NO:577), HIDPVS (SEQ ID NO:578), HIDPVSG (SEQ ID NO:579), FHIDPV (SEQ ID NO:580), FHIDPVS (SEQ ID NO:581), FHIDPVSG (SEQ ID NO:582), KFHIDPV (SEQ ID NO:583), KFHIDPVS (SEQ ID NO:584), KFHIDPVSG (SEQ ID NO:585), DAD, DADT (SEQ ID NO:586), DADTG (SEQ ID NO:587), IDAD (SEQ ID NO:588), IDADT (SEQ ID NO:589), IDADTG (SEQ ID NO:590), SIDAD (SEQ ID NO:591), SIDADT (SEQ ID NO:592), SIDADTG (SEQ ID NO:593), FSIDAD (SEQ ID NO:594), FSIDADT (SEQ ID NO:595), FSIDADTG (SEQ ID NO:596), QFSIDAD (SEQ ID NO:597), QFSIDADT (SEQ ID NO:598), QFSIDADTG (SEQ ID NO:599), DSV, DSVS (SEQ ID NO:600), DSVSG (SEQ ID NO:601), IDSV (SEQ ID NO:602), IDSVS (SEQ ID NO:603), IDSVSG (SEQ ID NO:604), HIDSV (SEQ ID NO:605), HIDSVS (SEQ ID NO:606), HIDSVSG (SEQ ID NO:607), FHIDSV (SEQ ID NO:608), FHIDSVS (SEQ ID NO:609), FHIDSVSG (SEQ ID NO:610), TFHIDSV (SEQ ID NO:611), TFHIDSVS (SEQ ID NO:612), TFHIDSVSG (SEQ ID NO:613), DSN, DSNS (SEQ ID NO:614), DSNSG (SEQ ID NO:615), IDSN (SEQ ID NO:616), IDSNS (SEQ ID NO:617), IDSNSG (SEQ ID NO:618), NIDSN (SEQ ID NO:619), NIDSNS (SEQ ID NO:620), NIDSNSG (SEQ ID NO:621), FNIDSN (SEQ ID NO:622), FNIDSNS (SEQ ID NO:623), FNIDSNSG (SEQ ID NO:624), AFNIDSN (SEQ ID NO:625), AFNIDSNS (SEQ ID NO:626), AFNIDSNSG (SEQ ID NO:627), DSS, DSSS (SEQ ID NO:628), DSSSG (SEQ ID NO:629), IDSS (SEQ ID NO:630), IDSSS (SEQ ID NO:631), IDSSSG (SEQ ID NO:632), TIDSS (SEQ ID NO:633), TIDSSS (SEQ ID NO:634), TIDSSSG (SEQ ID NO:635), FTIDSS (SEQ ID NO:636), FTIDSSS (SEQ ID NO:637), FTIDSSSG (SEQ ID NO:638), KFTIDSS (SEQ ID NO:639), KFTIDSSS (SEQ ID NO:640), KFTIDSSSG (SEQ ID NO:641), DEK, DEKN (SEQ ID NO:642), DEKNG (SEQ ID NO:643), LDEK (SEQ ID NO:644), LDEKN (SEQ ID NO:645), LDEKNG (SEQ ID NO:646), TLDEK (SEQ ID NO:647), TLDEKN (SEQ ID NO:648), TLDEKNG (SEQ ID NO:649), FTLDEK (SEQ ID NO:650), FTLDEKN (SEQ ID NO:651), FTLDEKNG (SEQ ID NO:652), LFTLDEK (SEQ ID NO:653), LFTLDEKN (SEQ ID NO:654), LFTLDEKNG (SEQ ID NO:655), NEK, NEKT (SEQ ID NO:656), NEKTG (SEQ ID NO:657), INEK (SEQ ID NO:658), INEKT (SEQ ID NO:659), INEKTG (SEQ ID NO:660), LINEK (SEQ ID NO:661), LINEKT (SEQ ID NO:662), LINEKTG (SEQ ID NO:663), FLINEK (SEQ ID NO:664), FLINEKT (SEQ ID NO:665), FLINEKTG (SEQ ID NO:666), KFLINEK (SEQ ID NO:667), KFLINEKT (SEQ ID NO:668) or KFLINEKTG (SEQ ID NO:4052). Linear peptides having such sequences may be modified at the N- and/or C-termini, as in the peptides N-Ac-KFHIDPVSG-NH₂ (SEQ ID NO:585), N-Ac-QFSIDADTG-NH₂ (SEQ ID NO:599), N-Ac-TFHIDSVSG-NH₂ (SEQ ID NO:613), N-Ac-AFNIDSNSG-NH₂ (SEQ ID NO:627), N-Ac-KFTIDSSSG-NH₂ (SEQ ID NO:641), N-Ac-LFTLDEKNG-NH₂ (SEQ ID NO:655) and N-Ac-KFLINEKTG-NH₂ (SEQ ID NO:4052).

[0121] Representative OB-cadherin CAR sequences comprise one or more of the peptide sequences DDK, IDDK (SEQ ID NO:4051) DDKS (SEQ ID NO:73), VIDDK (SEQ ID NO:74), IDDKS (SEQ ID NO:75), VIDDKS (SEQ ID NO:76), DDKSG (SEQ ID NO:77), IDDKSG (SEQ ID NO:78), VIDDKSG (SEQ ID NO:79), FVIDDK (SEQ ID NO:80), FVIDDKS (SEQ ID NO:81), FVIDDKSG (SEQ ID NO:82), IFVIDDK (SEQ ID NO:83), IFVIDDKS (SEQ ID NO:84), IFVIDDKSG (SEQ ID NO:85), EEY, IEEY (SEQ ID NO:86), EEYT (SEQ ID NO:87), VIEEY (SEQ ID NO:88), IEEYT (SEQ ID NO:89), VIEEYT (SEQ ID NO:90), EEYTG (SEQ ID NO:91), IEEYTG (SEQ ID NO:92), VIEEYTG (SEQ ID NO:93), FVIEEY (SEQ ID NO:94), FVIEEYT (SEQ ID NO:95), FVIEEYTG (SEQ ID NO:96), FFVIEEY (SEQ ID NO:97), FFVIEEYT (SEQ ID NO:98), FFVIEEYTG (SEQ ID NO:99), EAQ, VEAQ (SEQ ID NO:100), EAQT (SEQ ID NO:101), SVEAQ (SEQ ID NO:102), VEAQT (SEQ ID NO:103), SVEAQT (SEQ ID NO:104), EAQTG (SEQ ID NO:105), VEAQTG (SEQ ID NO:106), SVEAQTG (SEQ ID NO:107), FSVEAQ (SEQ ID NO:108), FSVEAQT (SEQ ID NO:109), FSVEAQTG (SEQ ID NO:110), YFSVEAQ (SEQ ID NO:111), YFSVEAQT (SEQ ID NO:112) or YFSVEAQTG (SEQ ID NO:113). Linear peptides having such sequences may be modified at the N- and/or C-termini, as in the peptides N-Ac-IFVIDDKSG-NH₂ (SEQ ID NO:85), N-Ac-FFVIEEYTG-NH₂ (SEQ ID NO:99) and N-Ac-YFSVEAQTG-NH₂ (SEQ ID NO:113).

[0122] Certain cadherin-5 CAR sequences comprise, for example, one or more of the peptide sequences: DAE, VDAE (SEQ ID NO:114), DAET (SEQ ID NO:115), RVDAE (SEQ ID NO:116), VDAET (SEQ ID NO:117), RVDAET (SEQ ID NO:118), DAETG (SEQ ID NO:119), VDAETG (SEQ ID NO:120), RVDAETG (SEQ ID NO:121), FRVDAE (SEQ ID NO:122), FRVDAET (SEQ ID NO:123), FRVDAETG (SEQ ID NO:124), VFRVDAE (SEQ ID NO:125), VFRVDAET (SEQ ID NO:126) or VFRVDAETG (SEQ ID NO:127). Linear peptides having such sequences may be modified at the N- and/or C-termini, as in the peptide N-Ac-VFRVDAETG-NH₂ (SEQ ID NO:127).

[0123] Those of ordinary skill in the art will recognize that similar peptide sequences may be designed to modulate a function mediated by other cadherins, following identification of a CAR sequence as described herein.

[0124] It will be apparent that certain of the peptide sequences provided above may modulate a function mediated by multiple nonclassical cadherins. In general, peptides comprising a greater number of consecutive residues derived from a particular nonclassical cadherin have a greater specificity for that cadherin. In addition, further flanking sequences may be included to enhance specificity. Such flanking sequences may be identified based on the sequences provided in FIG. 2, or based on published sequences. To achieve specificity (i.e., modulation of a particular nonclassical cadherin function that is enhanced relative to the modulation of a function mediated by a different cadherin), the addition of 2 to 5 flanking residues (preferably at least one residue on either side of the CAR sequence) is generally sufficient. Specificity may be evaluated using assays for the ability to inhibit functions mediated by particular cadherins, as described herein.

[0125] As noted above, modulating agents as described herein may comprise an analogue or mimetic of a nonclassical cadherin CAR sequence. An analogue generally retains at least 50% identity to a native nonclassical cadherin CAR sequence, and modulates a nonclassical cadherin-mediated function as described herein. Such analogues preferably contain at least three consecutive residues of, and more preferably at least five consecutive residues of, a nonclassical cadherin CAR sequence. An analogue may contain any of a variety of amino acid substitutions, additions, deletions and/or modifications (e.g., side chain modifications). Preferred amino acid substitutions are conservative. A “conservative substitution” is one in which an amino acid is substituted for another amino acid that has similar properties, such that one skilled in the art of peptide chemistry would expect the secondary structure and hydropathic nature of the polypeptide to be substantially unchanged. Amino acid substitutions may generally be made on the basis of similarity in polarity, charge, solubility, hydrophobicity, hydrophilicity and/or the amphipathic nature of the residues. For example, negatively charged amino acids include aspartic acid and glutamic acid; positively charged amino acids include lysine and arginine; and amino acids with uncharged polar head groups having similar hydrophilicity values include leucine, isoleucine and valine; glycine and alanine; asparagine and glutamine; and serine, threonine, phenylalanine and tyrosine. Other groups of amino acids that may represent conservative changes include: (1) ala, pro, gly, glu, asp, gln, asn, ser, thr; (2) cys, ser, tyr, thr; (3) val, ile, leu, met, ala, phe; (4) lys, arg, his; and (5) phe, tyr, trp, his. The critical determining feature of a nonclassical cadherin CAR sequence analogue is the ability to modulate a nonclassical cadherin-mediated function, which may be evaluated using the representative assays provided herein.

[0126] A mimetic is a non-peptidyl compound that is conformationally similar to a nonclassical cadherin CAR sequence, such that it modulates a nonclassical cadherin-mediated function as described below. Such mimetics may be designed based on techniques that evaluate the three dimensional structure of the peptide. For example, Nuclear Magnetic Resonance spectroscopy (NMR) and computational techniques may be used to determine the conformation of a nonclassical cadherin CAR sequence. NMR is widely used for structural analyses of both peptidyl and non-peptidyl compounds. Nuclear Overhauser Enhancements (NOE's), coupling constants and chemical shifts depend on the conformation of a compound. NOE data provides the interproton distance between protons through space and can be used to calculate the lowest energy conformation for the nonclassical cadherin CAR sequence. This information can then be used to design mimetics of the preferred conformation. Linear peptides in solution exist in many conformations. By using conformational restriction techniques it is possible to fix the peptide in the active conformation. Conformational restriction can be achieved by i) introduction of an alkyl group such as a methyl which sterically restricts free bond rotation; ii) introduction of unsaturation which fixes the relative positions of the terminal and geminal substituents; and/or iii) cyclization, which fixes the relative positions of the sidechains. Mimetics may be synthesized where one or more of the amide linkages has been replaced by isosteres, substituents or groups which have the same size or volume such as —CH₂NH—, —CSNH—, —CH₂S—, —CH═CH—, —CH₂CH₂—, —CONMe- and others. These backbone amide linkages can also be part of a ring structure (e.g., lactam). Mimetics may be designed where one or more of the side chain functionalities of the nonclassical cadherin CAR sequence are replaced by groups that do not necessarily have the same size or volume, but have similar chemical and/or physical properties which produce similar biological responses. Other mimetics may be small molecule mimics, which may be readily identified from small molecule libraries, based on the three-dimensional structure of the CAR sequence. It should be understood that, within embodiments described below, an analogue or mimetic may be substituted for a nonclassical cadherin CAR sequence.

[0127] Modulating agents, or peptide portions thereof, may be linear or cyclic peptides. The term “cyclic peptide,” as used herein, refers to a peptide or salt thereof that comprises (1) an intramolecular covalent bond between two non-adjacent residues and (2) at least one nonclassical cadherin CAR sequence or an analogue thereof. The intramolecular bond may be a backbone to backbone, side-chain to backbone or side-chain to side-chain bond (i.e., terminal functional groups of a linear peptide and/or side chain functional groups of a terminal or interior residue may be linked to achieve cyclization). Preferred intramolecular bonds include, but are not limited to, disulfide, amide and thioether bonds. One or more of any of the above nonclassical cadherin CAR sequences, or an analogue or mimetic thereof, may be incorporated into a cyclic peptide, with or without one or more other adhesion molecule binding sites. Additional adhesion molecule binding sites are described in greater detail below.

[0128] The size of a cyclic peptide ring generally ranges from 5 to about 15 residues, preferably from 5 to 10 residues. Additional residue(s) may be present on the N-terminal and/or C-terminal side of a nonclassical cadherin CAR sequence, and may be derived from sequences that flank a nonclassical cadherin CAR sequence, with or without amino acid substitutions and/or other modifications. Alternatively, additional residues present on one or both sides of the CAR sequence(s) may be unrelated to an endogenous sequence (e.g., residues that facilitate cyclization, purification or other manipulation and/or residues having a targeting or other function).

[0129] Within certain embodiments, a modulating agent may comprise a cyclic peptide that contains a nonclassical cadherin CAR sequence as provided in Table I (or a portion of such a CAR sequence). Certain cyclic peptides have the formula:

[chemical structure]

[0130] Within this formula, W is a tripeptide selected from the group consisting of EEY, DDK, EAQ, DAE, NEN, ESE, DSG, DEN, EPK, DAN, EEF, NDV, DET, DPK, DDT, DAN, DKF, DEL, DAD, NNK, DLV, NRD, DPS, NQK, NRN, NKD, EKD, ERD, DPV, DSV, DLY, DSN, DSS, DEK, NEK, RAL, YAL, YAT, FAT and YAS; X₁, and X₂ are optional, and if present, are independently selected from the group consisting of amino acid residues and combinations thereof in which the residues are linked by peptide bonds, and wherein X₁ and X₂ independently range in size from 0 to 10 residues, such that the sum of residues contained within X₁ and X₂ ranges from 1 to 12; Y₁ and Y₂ are independently selected from the group consisting of amino acid residues, and wherein a covalent bond is formed between residues Y₁ and Y₂; and Z₁ and Z₂ are optional, and if present, are independently selected from the group consisting of amino acid residues and combinations thereof in which the residues are linked by peptide bonds.

[0131] Cyclic peptides may comprise any of the above CAR sequence(s). Such cyclic peptides may be used as modulating agents without modification, or may be incorporated into a modulating agent.

[0132] Representative cyclic peptides comprising a cadherin-6 CAR sequence include: CNENC (SEQ ID NO:983), CINENC (SEQ ID NO:984), CNENTC (SEQ ID NO:985), CIINENC (SEQ ID NO:986), CINENTC (SEQ ID NO:987), CIINENTC (SEQ ID NO:988), CNENTGC (SEQ ID NO:989), CINENTGC (SEQ ID NO:990), CIINENTGC (SEQ ID NO:991), CFIINENC (SEQ ID NO:992), CFIINENTC (SEQ ID NO:993), CFIINENTGC (SEQ ID NO:994), CLFIINENC (SEQ ID NO:995), CLFIINENTC (SEQ ID NO:996), CLFIINENTGC (SEQ ID NO:997), DNENK (SEQ ID NO:998), DINENK (SEQ ID NO:999), DIINENK (SEQ ID NO:1000), DFIINENK (SEQ ID NO:1001), DLFIINENK (SEQ ID NO:1002), DNENTK (SEQ ID NO:982), DINENTK (SEQ ID NO:2883), DIINENTK (SEQ ID NO:2884), DFIINENTK (SEQ ID NO:2885), DLFIINENTK (SEQ ID NO:2946), DNENTGK (SEQ ID NO:2947), DINENTGK (SEQ ID NO:2948), DIINENTGK (SEQ ID NO:3009), DFIINENTGK (SEQ ID NO:3010), DLFIINENTGK (SEQ ID NO:3011), ENENTK (SEQ ID NO:3055), EINENTK (SEQ ID NO:3630), EIINENTK (SEQ ID NO:3736), EFIINENTK (SEQ ID NO:3842), ELFIINENTK (SEQ ID NO:3890), ENENTGK (SEQ ID NO:3891), EINENTGK (SEQ ID NO:3892), EIINENTGK (SEQ ID NO:3893), EFIINENTGK (SEQ ID NO:3894), ELFIINENTGK (SEQ ID NO:3895), ENENK (SEQ ID NO:1003), EINENK (SEQ ID NO:1004), EIINENK (SEQ ID NO:1005), EFIINENK (SEQ ID NO:1006), ELFIINENK (SEQ ID NO:1007), KNEND (SEQ ID NO:1008), KINEND (SEQ ID NO:1009), KNENTD (SEQ ID NO:1010), KIINEND (SEQ ID NO:1011), KINENTD (SEQ ID NO:1012), KIINENTD (SEQ ID NO:1013), KNENTGD (SEQ ID NO:1014), KINENTGD (SEQ ID NO:1015), KIINENTGD (SEQ ID NO:1016), KFIINEND (SEQ ID NO:1017), KFIINENTD (SEQ ID NO:1018), KFIINENTGD (SEQ ID NO:1019), KLFIINEND (SEQ ID NO:1020), KLFIINENTD (SEQ ID NO:1021), KLFIINENTGD (SEQ ID NO:1022), VNENT (SEQ ID NO:1023), INENT (SEQ ID NO:1024), IINENT (SEQ ID NO:1025), NENTG (SEQ ID NO:1026), INENTG (SEQ ID NO:1027) KNENE (SEQ ID NO:1028), KINENE (SEQ ID NO:1029), KNENTE (SEQ ID NO:1030), KIINENE (SEQ ID NO:1031), KINENTE (SEQ ID NO:1032), KIINENTE (SEQ ID NO:1033), KNENTGE (SEQ ID NO:1034), KINENTGE (SEQ ID NO:1035), KIINENTGE (SEQ ID NO:11036), KFIINENE (SEQ ID NO:1037), KFIINENTE (SEQ ID NO:1038), KFIINENTGE (SEQ ID NO:1039), KLFIINENE (SEQ ID NO:1040), KLFIINENTE (SEQ ID NO:1041), KLFIINENTGE (SEQ ID NO:1042), IINEN (SEQ ID NO:1043), FIINEN (SEQ ID NO:1044), FIINENT (SEQ ID NO:1045), FIINENTG (SEQ ID NO:1046), LFIINEN (SEQ ID NO:1047), LFIINENT (SEQ ID NO:1048), LFIINENTG (SEQ ID NO:1049), CEEYC (SEQ ID NO:1050), CEEYTC (SEQ ID NO:1051), CEEYTGC (SEQ ID NO:1052), CLEEYC (SEQ ID NO:1053), CLEEYTC (SEQ ID NO:1054), CLEEYTGC (SEQ ID NO:1055), CLLEEYC (SEQ ID NO:1056), CLLEEYTGC (SEQ ID NO:1057), CFLLEEYC (SEQ ID NO:1058), CLLEEYTC (SEQ ID NO:1059), CFLLEEYTGC (SEQ ID NO:1060), CFFLLEEYC (SEQ ID NO:1061), CFFLLEEYTC (SEQ ID NO:1062), CFFLLEEYTGC (SEQ ID NO:1063), CESEC (SEQ ID NO:1064), CESETC (SEQ ID NO:1065), CESETGC (SEQ ID NO:1066), CVESEC (SEQ ID NO:1067), CVSESTC (SEQ ID NO:1068), CVESETGC (SEQ ID NO:1069), CSVESEC (SEQ ID NO:1070), CSVESETC (SEQ ID NO:1071), CSVESETGC (SEQ ID NO:1072), CFSVESEC (SEQ ID NO:1073), CFSVESETC (SEQ ID NO:1074), CFSVESETGC (SEQ ID NO:1075), CYFSVESEC (SEQ ID NO:1076), CYFSVESETC (SEQ ID NO:1077), CYFSVESETGC (SEQ ID NO:1078), CDSGC (SEQ ID NO:1079), CDSGNC (SEQ ID NO:1080), CDSGNGC (SEQ ID NO:1081), CIDSGC (SEQ ID NO:1082), CIDSGNC (SEQ ID NO:1083), CIDSGNGC (SEQ ID NO:1084), CNIDSGC (SEQ ID NO:1085), CNIDSGNC (SEQ ID NO:1086), CNIDSGNGC (SEQ ID NO:1087), CFNIDSGC (SEQ ID NO:1088), CFNIDSGNC (SEQ ID NO:1089), CFNIDSGNGC (SEQ ID NO:1090), CIFNIDSGC (SEQ ID NO:1091), CIFNIDSGNC (SEQ ID NO:1092), CIFNIDSGNGC (SEQ ID NO:1093), KEEYD (SEQ ID NO:1094), KLEEYD (SEQ ID NO:1095), KEEYTD (SEQ ID NO:1096), KEEYTGD (SEQ ID NO:1097), KLEEYTD (SEQ ID NO:1098), KLEEYTGD (SEQ ID NO:1099), KLLEEYD (SEQ ID NO:1100), KLLEEYTGD (SEQ ID NO:1101), KFLLEEYD (SEQ ID NO:1102), KLLEEYTD (SEQ ID NO:1103), KFLLEEYTGD (SEQ ID NO:1104), KFFLLEEYD (SEQ ID NO:1105), KFFLLEEYTD (SEQ ID NO:1106), KFFLLEEYTGD (SEQ ID NO:1107), KESED (SEQ ID NO:1108), KESETD (SEQ ID NO:1109), KESETGD (SEQ ID NO:1110), KVESED (SEQ ID NO:1111), KVSESTD (SEQ ID NO:1112), KVESETGD (SEQ ID NO:1113), KSVESED (SEQ ID NO:1114), KSVESETD (SEQ ID NO:1115), KSVESETGD (SEQ ID NO:1116), KFSVESED (SEQ ID NO:1117), KFSVESETD (SEQ ID NO:1118), KFSVESETGD (SEQ ID NO:1119), KYFSVESED (SEQ ID NO:1120), KYFSVESETD (SEQ ID NO:1121), KYFSVESETGD (SEQ ID NO:1122), KDSGD (SEQ ID NO:1123), KDSGND (SEQ ID NO:1124), KDSGNGD (SEQ ID NO:1125), KIDSGD (SEQ ID NO:1126), KIDSGND (SEQ ID NO:1127), KIDSGNGD (SEQ ID NO:1128), KNIDSGD (SEQ ID NO:1129), KNIDSGND (SEQ ID NO:1130), KNIDSGNGD (SEQ ID NO:1131), KFNIDSGD (SEQ ID NO:1132), KFNIDSGND (SEQ ID NO:1133), KFNIDSGNGD (SEQ ID NO:1134), KIFNIDSGD (SEQ ID NO:1135), KIFNIDSGND (SEQ ID NO:1136), KIFNIDSGNGD (SEQ ID NO:1137), EEEYK (SEQ ID NO:1138), EEEYTK (SEQ ID NO:1139), EEEYTGK (SEQ ID NO:1140), ELEEYK (SEQ ID NO:1141), EEEYTK (SEQ ID NO:1142), ELEEYTGK (SEQ ID NO:1143), ELLEEYK (SEQ ID NO:1144), ELLEEYTGK (SEQ ID NO:1145), EFLLEEYK (SEQ ID NO:1146), ELLEEYTK (SEQ ID NO:1147), EFLLEEYTGK (SEQ ID NO:1148), EFFLLEEYK (SEQ ID NO:1149), EFFLLEEYTK (SEQ ID NO:1150), EFFLLEEYTGK (SEQ ID NO:1151), EESEK (SEQ ID NO:1152), EESETK (SEQ ID NO:1153), EESETGK (SEQ ID NO:1154), EVESEK (SEQ ID NO:1155), EVSESTK (SEQ ID NO:1156), EVESETGK (SEQ ID NO:1157), ESVESEK (SEQ ID NO:1158), ESVESETK (SEQ ID NO:1159), ESVESETGK (SEQ ID NO:1160), EFSVESEK (SEQ ID NO:1161), EFSVESETK (SEQ ID NO:1162), EFSVESETGK (SEQ ID NO:1163), EYFSVESEK (SEQ ID NO:1164), EYFSVESETK (SEQ ID NO:1165), EYFSVESETGK (SEQ ID NO:1166), EDSGK (SEQ ID NO:1167), EDSGNK (SEQ ID NO:1168), EDSGNGK (SEQ ID NO:1169), EIDSGK (SEQ ID NO:1170), EIDSGNK (SEQ ID NO:1171), EIDSGNGK (SEQ ID NO:1172), ENIDSGK (SEQ ID NO:1173), ENIDSGNK (SEQ ID NO:1174), ENIDSGNGK (SEQ ID NO:1175), EFNIDSGK (SEQ ID NO:1176), EFNIDSGNK (SEQ ID NO:1177), EFNIDSGNGK (SEQ ID NO:1178), EIFNIDSGK (SEQ ID NO:1179), EIFNIDSGNK (SEQ ID NO:1180), EIFNIDSGNGK (SEQ ID NO:1181), DEEYK (SEQ ID NO:1182), DLEEYK (SEQ ID NO:1183), DLEEYTK (SEQ ID NO:1184), DLEEYTGK (SEQ ID NO:1185), DLLEEYK (SEQ ID NO:1186), DLLEEYTGK (SEQ ID NO:1187), DFLLEEYK (SEQ ID NO:1188), DLLEEYTK (SEQ ID NO:1189), DFLLEEYTGK (SEQ ID NO:1190), DFFLLEEYK (SEQ ID NO:1191), DFFLLEEYTK (SEQ ID NO:1192), DFFLLEEYTGK (SEQ ID NO:1193), DESEK (SEQ ID NO:1194), DESETK (SEQ ID NO:1195), DESETGK (SEQ ID NO:1196), DVESEK (SEQ ID NO:1197), DVSESTK (SEQ ID NO:1198), DVESETGK (SEQ ID NO:1199), DSVESEK (SEQ ID NO:1200), DSVESETK (SEQ ID NO:1201), DSVESETGK (SEQ ID NO:1202), DFSVESEK (SEQ ID NO:1203), DFSVESETK (SEQ ID NO:1204), DFSVESETGK (SEQ ID NO:1205), DYFSVESEK (SEQ ID NO:1206), DYFSVESETK (SEQ ID NO:1207), DYFSVESETGK (SEQ ID NO:1208), DDSGK (SEQ ID NO:1209), DDSGNK (SEQ ID NO:1210), DDSGNGK (SEQ ID NO:1211), DIDSGK (SEQ ID NO:1212), DIDSGNK (SEQ ID NO:1213), DIDSGNGK (SEQ ID NO:1214), DNIDSGK (SEQ ID NO:1215), DNIDSGNK (SEQ ID NO:1216), DNIDSGNGK (SEQ ID NO:1217), DFNIDSGK (SEQ ID NO:1218), DFNIDSGNK (SEQ ID NO:1219), DFNIDSGNGK (SEQ ID NO:1220), DIFNIDSGK (SEQ ID NO:1221), DIFNIDSGNK (SEQ ID NO:1222), DIFNIDSGNGK (SEQ ID NO:1223), KEEYE (SEQ ID NO:1224), KLEEYE (SEQ ID NO:1225), KLEEYTE (SEQ ID NO:1226), KLEEYTGE (SEQ ID NO:1227), KLLEEYE (SEQ ID NO:1228), KLLEEYTGE (SEQ ID NO:1229), KFLLEEYE (SEQ ID NO:1230), KLLEEYTE (SEQ ID NO:1231), KFLLEEYTGE (SEQ ID NO:1232), KFFLLEEYE (SEQ ID NO:1233), KFFLLEEYTE (SEQ ID NO:1234), KFFLLEEYTGE (SEQ ID NO:1235), KNENE (SEQ ID NO:1236), KNENTE (SEQ ID NO:1237), KINENTGE (SEQ ID NO:1238), KESEE (SEQ ID NO:1239), KESETE (SEQ ID NO:1240), KESETGE (SEQ ID NO:1241), KVESEE (SEQ ID NO:1242) KVSESTE (SEQ ID NO:1243), KVESETGE (SEQ ID NO:1244), KSVESEE (SEQ ID NO:1245), KSVESETE (SEQ ID NO:1246), KSVESETGE (SEQ ID NO:1247), KFSVESEE (SEQ ID NO:1248), KFSVESETE (SEQ ID NO:1249), KFSVESETGE (SEQ ID NO:1250), KYFSVESEE (SEQ ID NO:1251), KYFSVESETE (SEQ ID NO:1252), KYFSVESETGE (SEQ ID NO:1253), KDSGE (SEQ ID NO:1254), KDSGNE (SEQ ID NO:1255), KDSGNGE (SEQ ID NO:1256), KIDSGE (SEQ ID NO:1257), KIDSGNE (SEQ ID NO:1258), KIDSGNGE (SEQ ID NO:1259), KNIDSGE (SEQ ID NO:1260), KNIDSGNE (SEQ ID NO:1261), KNIDSGNGE (SEQ ID NO:1262), KFNIDSGE (SEQ ID NO:1263), KFNIDSGNE (SEQ ID NO:1264), KFNIDSGNGE (SEQ ID NO:1265), KIFNIDSGE (SEQ ID NO:1266), KIFNIDSGNE (SEQ ID NO:1267), KIFNIDSGNGE (SEQ ID NO:1268), LEEYT (SEQ ID NO:1269), LEEYTG (SEQ ID NO:1270), LLEEY (SEQ ID NO:1271), LLEEYTG (SEQ ID NO:1272), FLLEEY (SEQ ID NO:1273), LLEEYT (SEQ ID NO:1274), FLLEEYTG (SEQ ID NO:1275), FFLLEEY (SEQ ID NO:1276), FFLLEEYT (SEQ ID NO:1277), FFLLEEYTG (SEQ ID NO:1278), ESETG (SEQ ID NO:1279), VSEST (SEQ ID NO:1280), VESETG (SEQ ID NO:1281), SVESE (SEQ ID NO:1282), SVESET (SEQ ID NO:1283), SVESETG (SEQ ID NO:1284), FSVESE (SEQ ID NO:1285), FSVESET (SEQ ID NO:1286), FSVESETG (SEQ ID NO:1287), YFSVESE (SEQ ID NO:1288), YFSVESET (SEQ ID NO:1289), YFSVESETG (SEQ ID NO:1290), DSGNG (SEQ ID NO:1291), IDSGN (SEQ ID NO:1292), IDSGNG (SEQ ID NO:1293), NIDSG (SEQ ID NO:1294), NIDSGN (SEQ ID NO:1295), NIDSGNG (SEQ ID NO:1296), FNIDSG (SEQ ID NO:1297), FNIDSGN (SEQ ID NO:1298), FNIDSGNG (SEQ ID NO:1299), IFNIDSG (SEQ ID NO:1300), IFNIDSGN (SEQ ID NO:1301) and IFNIDSGNG (SEQ ID NO:1302).

[0133] Representative cyclic peptides comprising a cadherin-7 CAR sequence include: CDENC (SEQ ID NO:1303), CIDENC (SEQ ID NO:1304), CDENTC (SEQ ID NO:1305), CIIDENC (SEQ ID NO:1306), CIDENTC (SEQ ID NO:1307), CIIDENTC (SEQ ID NO:1308), CDENTGC (SEQ ID NO:1309), CIDENTGC (SEQ ID NO:1310), CIIDENTGC (SEQ ID NO:1311), CFIIDENC (SEQ ID NO:1312), CFIIDENTC (SEQ ID NO:1313), CFIIDENTGC (SEQ ID NO:1314), CIFIIDENC (SEQ ID NO:1315), CIFIIDENTC (SEQ ID NO:1316), CIFIIDENTGC (SEQ ID NO:1317), DDENK (SEQ ID NO:1319), DIDENK (SEQ ID NO:1320), DIIDENK (SEQ ID NO:1321), DFIIDENK (SEQ ID NO:1322), DIFIIDENK (SEQ ID NO:1323), DDENTK (SEQ ID NO:1318), DIDENTK (SEQ ID NO:1344), DIIDENTK (SEQ ID NO:3896), DFIIDENTK (SEQ ID NO:3897), DIFIIDENTK (SEQ ID NO:3898), DDENTGK (SEQ ID NO:3899), DIDENTGK (SEQ ID NO:3900), DIIDENTGK (SEQ ID NO:3901), DFIIDENTGK (SEQ ID NO:3902), DIFIIDENTGK (SEQ ID NO:3903), EDENTK (SEQ ID NO:3904), EIDENTK (SEQ ID NO:3905), EIIDENTK (SEQ ID NO:3906), EFIIDENTK (SEQ ID NO:3907), EIFIIDENTK (SEQ ID NO:3908), EDENTGK (SEQ ID NO:3909), EIDENTGK (SEQ ID NO:3910), EIIDENTGK (SEQ ID NO:3911), EFIIDENTGK (SEQ ID NO:3912), EIFIIDENTGK (SEQ ID NO:3913), EDENK (SEQ ID NO:1324), EIDENK (SEQ ID NO:1325), EIIDENK (SEQ ID NO:1326), EFIIDENK (SEQ ID NO:1327), EIFIIDENK (SEQ ID NO:1328), KDEND (SEQ ID NO:1329), KIDEND (SEQ ID NO:1330), KDENTD (SEQ ID NO:1331), KIIDEND (SEQ ID NO:1332), KIDENTD (SEQ ID NO:1333), KIIDENTD (SEQ ID NO:1334), KDENTGD (SEQ ID NO:1335), KIDENTGD (SEQ ID NO:1336), KIIDENTGD (SEQ ID NO:1337), KFIIDEND (SEQ ID NO:1338), KFIIDENTD (SEQ ID NO:1339), KFIIDENTGD (SEQ ID NO:1340), KIFIIDEND (SEQ ID NO:1341), KIFIIDENTD (SEQ ID NO:1342), KIFIIDENTGD (SEQ ID NO:1343), IDENT (SEQ ID NO:1345), IIDENT (SEQ ID NO:1346), DENTG (SEQ ID NO:1347), IDENTG (SEQ ID NO:1348) KDENE (SEQ ID NO:1349), KIDENE (SEQ ID NO:1350), KDENTE (SEQ ID NO:1351), KIIDENE (SEQ ID NO:1352), KIDENTE (SEQ ID NO:1353), KIIDENTE (SEQ ID NO:1354), KDENTGE (SEQ ID NO:1355), KIDENTGE (SEQ ID NO:1356), KIIDENTGE (SEQ ID NO:1357), KFIIDENE (SEQ ID NO:1358), KFIIDENTE (SEQ ID NO:1359), KFIIDENTGE (SEQ ID NO:1360), KIFIIDENE (SEQ ID NO:1361), KIFIIDENTE (SEQ ID NO:1362), KIFIIDENTGE (SEQ ID NO:1363), DDENTK (SEQ ID NO:1364), IIDEN (SEQ ID NO:1365), IIDENTG (SEQ ID NO:1366), FIIDEN (SEQ ID NO:1367), FIIDENT (SEQ ID NO:1368), FIIDENTG (SEQ ID NO:1369), IFIIDEN (SEQ ID NO:1370), IFIIDENT (SEQ ID NO:1371), IFIIDENTG (SEQ ID NO:1372), CEPKC (SEQ ID NO:1373), CEPKTC (SEQ ID NO:1374), CEPKTGC (SEQ ID NO:1375), CVEPKC (SEQ ID NO:1376), CVEPKTC (SEQ ID NO:1377), CVEPKTGC (SEQ ID NO:1378), CSVEPKC (SEQ ID NO:1379), CSVEPKTC (SEQ ID NO:1380), CSVEPKTGC (SEQ ID NO:1381), CFSVEPKC (SEQ ID NO:1382), CFSVEPKTC (SEQ ID NO:1383), CFSVEPKTGC (SEQ ID NO:1384), CYFSVEPKC (SEQ ID NO:1385), CYFSVEPKTC (SEQ ID NO:1386), CYFSVEPKTGC (SEQ ID NO:1387), CDANC (SEQ ID NO:1388), CDANSC (SEQ ID NO:1389), CDANSGC (SEQ ID NO:1390), CIDANC (SEQ ID NO:1391), CIDANSC (SEQ ID NO:1392), CIDANSGC (SEQ ID NO:1393), CNIDANC (SEQ ID NO:1394), CNIDANSC (SEQ ID NO:1395), CNIDANSGC (SEQ ID NO:1396), CFNIDANC (SEQ ID NO:1397), CFNIDANSC (SEQ ID NO:1398), CFNIDANSGC (SEQ ID NO:1399), CYFNIDANC (SEQ ID NO:1400), CYFNIDANSC (SEQ ID NO:1401), CYFNIDANSGC (SEQ ID NO:1402), EEPKK (SEQ ID NO:1403), EEPKTK (SEQ ID NO:1404), EEPKTGK (SEQ ID NO:1405), EVEPKK (SEQ ID NO:1406), EVEPKTK (SEQ ID NO:1407), EVEPKTGK (SEQ ID NO:1408), ESVEPKK (SEQ ID NO:1409), ESVEPKTK (SEQ ID NO:1410), ESVEPKTGK (SEQ ID NO:1411), EFSVEPKK (SEQ ID NO:1412), EFSVEPKTK (SEQ ID NO:1413), EFSVEPKTGK (SEQ ID NO:1414), EYFSVEPKK (SEQ ID NO:1415), EYFSVEPKTK (SEQ ID NO:1416), EYFSVEPKTGK (SEQ ID NO:1417), EDANK (SEQ ID NO:1418), EDANSK (SEQ ID NO:1419), EDANSGK (SEQ ID NO:1420), EIDANK (SEQ ID NO:1421), EIDANSK (SEQ ID NO:1422), EIDANSGK (SEQ ID NO:1423), ENIDANK (SEQ ID NO:1424), ENIDANSK (SEQ ID NO:1425), ENIDANSGK (SEQ ID NO:1426), EFNIDANK (SEQ ID NO:1427), EFNIDANSK (SEQ ID NO:1428), EFNIDANSGK (SEQ ID NO:1429), EYFNIDANK (SEQ ID NO:1430), EYFNIDANSK (SEQ ID NO:1431), EYFNIDANSGK (SEQ ID NO:1432), KDAND (SEQ ID NO:1433), KIDAND (SEQ ID NO:1434), KDANSD (SEQ ID NO:1435), KNIDAND (SEQ ID NO:1436), KIDANSD (SEQ ID NO:1437), KNIDANSD (SEQ ID NO:1438), KDANSGD (SEQ ID NO:1439), KIDANSGD (SEQ ID NO:1440), KNIDANSGD (SEQ ID NO:1441), KFNIDAND (SEQ ID NO:1442), KFNIDANSD (SEQ ID NO:1443), KFNIDANSGD (SEQ ID NO:1444), KYFNIDAND (SEQ ID NO:1445), KYFNIDANSD (SEQ ID NO:1446), KYFNIDANSGD (SEQ ID NO:1447), KEPKD (SEQ ID NO:1448), KEPKTD (SEQ ID NO:1449), KEPKTGD (SEQ ID NO:1450), KVEPKD (SEQ ID NO:1451), KVEPKTD (SEQ ID NO:1452), KVEPKTGD (SEQ ID NO:1453), KSVEPKD (SEQ ID NO:1454), KSVEPKTD (SEQ ID NO:1455), KSVEPKTGD (SEQ ID NO:1456), KFSVEPKD (SEQ ID NO:1457), KFSVEPKTD (SEQ ID NO:1458), KFSVEPKTGD (SEQ ID NO:1459), KYFSVEPKD (SEQ ID NO:1460), KYFSVEPKTD (SEQ ID NO:1461), KYFSVEPKTGD (SEQ ID NO:1462), KDAND (SEQ ID NO:1463), KDANSD (SEQ ID NO:1464), KDANSGD (SEQ ID NO:1465), KIDAND (SEQ ID NO:1466), KIDANSD (SEQ ID NO:1467), KIDANSGD (SEQ ID NO:1468), KNIDAND (SEQ ID NO:1469), KNIDANSD (SEQ ID NO:1470), KNIDANSGD (SEQ ID NO:1471), KFNIDAND (SEQ ID NO:1472), KFNIDANSD (SEQ ID NO:1473), KFNIDANSGD (SEQ ID NO:1474), KYFNIDAND (SEQ ID NO:1475), KYFNIDANSD (SEQ ID NO:1476), KYFNIDANSGD (SEQ ID NO:1477), DEPKK (SEQ ID NO:1478), DEPKTK (SEQ ID NO:1479), DEPKTGK (SEQ ID NO:1480), DVEPKK (SEQ ID NO:1481), DVEPKTK (SEQ ID NO:1482), DVEPKTGK (SEQ ID NO:1483), DSVEPKK (SEQ ID NO:1484), DSVEPKTK (SEQ ID NO:1485), DSVEPKTGK (SEQ ID NO:1486), DFSVEPKK (SEQ ID NO:1487), DFSVEPKTK (SEQ ID NO:1488), DFSVEPKTGK (SEQ ID NO:1489), DYFSVEPKK (SEQ ID NO:1490), DYFSVEPKTK (SEQ ID NO:1491), DYFSVEPKTGK (SEQ ID NO:1492), DDANK (SEQ ID NO:1493), DDANSK (SEQ ID NO:1494), DDANSGK (SEQ ID NO:1495), DIDANK (SEQ ID NO:1496), DIDANSK (SEQ ID NO:1497), DIDANSGK (SEQ ID NO:1498), DNIDANK (SEQ ID NO:1499), DNIDANSK (SEQ ID NO:1500), DNIDANSGK (SEQ ID NO:1501), DFNIDANK (SEQ ID NO:1502), DFNIDANSK (SEQ ID NO:1503), DFNIDANSGK (SEQ ID NO:1504), DYFNIDANK (SEQ ID NO:1505), DYFNIDANSK (SEQ ID NO:1506), DYFNIDANSGK (SEQ ID NO:1507), KDENE (SEQ ID NO:1508), KDENTE (SEQ ID NO:1509), KDENTGE (SEQ ID NO:1510), KIDENE (SEQ ID NO:1511), KIDENTE (SEQ ID NO:1512), KIDENTGE (SEQ ID NO:1513), KIIDENE (SEQ ID NO:1514), KIIDENTE (SEQ ID NO:1515), KIIDENTGE (SEQ ID NO:1516), KFIIDENE (SEQ ID NO:1517), KFIIDENTE (SEQ ID NO:1518), KFIIDENTGE (SEQ ID NO:1519), KIFIIDENE (SEQ ID NO:1520), KIFIIDENTE (SEQ ID NO:1521), KIFIIDENTGE (SEQ ID NO:1522), KEPKE (SEQ ID NO:1523), KEPKTE (SEQ ID NO:1524), KEPKTGE (SEQ ID NO:1525), KVEPKE (SEQ ID NO:1526), KVEPKTE (SEQ ID NO:1527), KVEPKTGE (SEQ ID NO:1528), KSVEPKE (SEQ ID NO:1529), KSVEPKTE (SEQ ID NO:1530), KSVEPKTGE (SEQ ID NO:1531), KFSVEPKE (SEQ ID NO:1532), KFSVEPKTE (SEQ ID NO:1533), KFSVEPKTGE (SEQ ID NO:1534), KYFSVEPKE (SEQ ID NO:1535), KYFSVEPKTE (SEQ ID NO:1536), KYFSVEPKTGE (SEQ ID NO:1537), KDANE (SEQ ID NO:1538), KDANSE (SEQ ID NO:1539), KDANSGE (SEQ ID NO:1540), KIDANE (SEQ ID NO:1541), KIDANSE (SEQ ID NO:1542), KIDANSGE (SEQ ID NO:1543), KNIDANE (SEQ ID NO:1544), KNIDANSE (SEQ ID NO:1545), KNIDANSGE (SEQ ID NO:1546), KFNIDANE (SEQ ID NO:1547), KFNIDANSE (SEQ ID NO:1548), KFNIDANSGE (SEQ ID NO:1549), KYFNIDANE (SEQ ID NO:1550), KYFNIDANSE (SEQ ID NO:1551), KYFNIDANSGE (SEQ ID NO:1552), DENTG (SEQ ID NO:1553), IDENT (SEQ ID NO:1554), IDENTG (SEQ ID NO:1555), IIDEN (SEQ ID NO:1556), IIDENT (SEQ ID NO:1557), IIDENTG (SEQ ID NO:1558), FIIDEN (SEQ ID NO:1559), FIIDENT (SEQ ID NO:1560), FIIDENTG (SEQ ID NO:1561), IFIIDEN (SEQ ID NO:1562), IFIIDENT (SEQ ID NO:1563), IFIIDENTG (SEQ ID NO:1564), EPKTG (SEQ ID NO:1565), VEPKT (SEQ ID NO:1566), VEPKTG (SEQ ID NO:1567), SVEPK (SEQ ID NO:1568), SVEPKT (SEQ ID NO:1569), SVEPKTG (SEQ ID NO:1570), FSVEPK (SEQ ID NO:1571), FSVEPKT (SEQ ID NO:1572), FSVEPKTG (SEQ ID NO:1573), YFSVEPK (SEQ ID NO:1574), YFSVEPKT (SEQ ID NO:1575), YFSVEPKTG (SEQ ID NO:1576), DANSG (SEQ ID NO:1577), IDANS (SEQ ID NO:1578), IDANSG (SEQ ID NO:1579), NIDAN (SEQ ID NO:1580), NIDANS (SEQ ID NO:1581), NIDANSG (SEQ ID NO:1582), FNIDAN (SEQ ID NO:1583), FNIDANS (SEQ ID NO:1584), FNIDANSG (SEQ ID NO:1585), YFNIDAN (SEQ ID NO:1586), YFNIDANS (SEQ ID NO:1587) and YFNIDANSG (SEQ ID NO:1588).

[0134] Representative cyclic peptides comprising a cadherin-8 CAR sequence include: CNDVC (SEQ ID NO:1589), CINDVC (SEQ ID NO:1590), CNDVTC (SEQ ID NO:1591), CQINDVC (SEQ ID NO:1592), CINDVTC (SEQ ID NO:1593), CQINDVTC (SEQ ID NO:1594), CNDVTGC (SEQ ID NO:1595), CINDVTGC (SEQ ID NO:1596), CQINDVTGC (SEQ ID NO:1597), CFQINDVC (SEQ ID NO:1598), CFQINDVTC (SEQ ID NO:1599), CFQINDVTGC (SEQ ID NO:1600), CIFQINDVC (SEQ ID NO:1601), CIFQINDVTC (SEQ ID NO:1602), CIFQINDVTGC (SEQ ID NO:1603), DNDVK (SEQ ID NO:1604), DINDVK (SEQ ID NO:1605), DQINDVK (SEQ ID NO:1606), DFQINDVK (SEQ ID NO:1607), DIFQINDVK (SEQ ID NO:1608), DNDVTK (SEQ ID NO:3924), DINDVTK (SEQ ID NO:3925), DQINDVTK (SEQ ID NO:3926), DFQINDVTK (SEQ ID NO:3927), DIFQINDVTK (SEQ ID NO:3928), DNDVTGK (SEQ ID NO:3929), DINDVTGK (SEQ ID NO:3930), DQINDVTGK (SEQ ID NO:3931), DFQINDVTGK (SEQ ID NO:3932), DIFQINDVTGK (SEQ ID NO:3933), ENDVTK (SEQ ID NO:3914), EINDVTK (SEQ ID NO:3915), EQINDVTK (SEQ ID NO:3916), EFQINDVTK (SEQ ID NO:3917), EIFQINDVTK (SEQ ID NO:3918), ENDVTGK (SEQ ID NO:3919), EINDVTGK (SEQ ID NO:3920), EQINDVTGK (SEQ ID NO:3921), EFQINDVTGK (SEQ ID NO:3922), EIFQINDVTGK (SEQ ID NO:3923), ENDVK (SEQ ID NO:1609), EINDVK (SEQ ID NO:1610), EQINDVK (SEQ ID NO:1611), EFQINDVK (SEQ ID NO:1612), EIFQINDVK (SEQ ID NO:1613), KNDVD (SEQ ID NO:1614), KINDVD (SEQ ID NO:1615), KNDVTD (SEQ ID NO:1616), KQINDVD (SEQ ID NO:1617), KINDVTD (SEQ ID NO:1618), KQINDVTD (SEQ ID NO:1619), KNDVTGD (SEQ ID NO:1620), KINDVTGD (SEQ ID NO:1621), KQINDVTGD (SEQ ID. NO:1622), KFQINDVD (SEQ ID NO:1623), KFQINDVTD (SEQ ID NO:1624), KFQINDVTGD (SEQ ID NO:1625), KIFQINDVD (SEQ ID NO:1626), KIFQINDVTD (SEQ ID NO:1627), KIFQINDVTGD (SEQ ID NO:1628), VNDVT (SEQ ID NO:1629), INDVT (SEQ ID NO:1630), QINDVT (SEQ ID NO:1631), NDVTG (SEQ ID NO:1632), INVTG (SEQ ID NO:1633) KNDVE (SEQ ID NO:1634), KINDVE (SEQ ID NO:1635), KNDVTE (SEQ ID NO:1636), KQINDVE (SEQ ID NO:1637), KINDVTE (SEQ ID NO:1638), KQINDVTE (SEQ ID NO:1639), KNDVTGE (SEQ ID NO:1640), KINDVTGE (SEQ ID NO:1641), KQINDVTGE (SEQ ID NO:1642), KFQINDVE (SEQ ID NO:1643), KFQINDVTE (SEQ ID NO:1644), KFQINDVTGE (SEQ ID NO:1645), KIFQINDVE (SEQ ID NO:1646), KIFQINDVTE (SEQ ID NO:1647), KIFQINDVTGE (SEQ ID NO:1648), CEEFC (SEQ ID NO:1649), CEEFSC (SEQ ID NO:1650), CEEFSGC (SEQ ID NO:1651), CLEEFC (SEQ ID NO:1652), CLEEFSC (SEQ ID NO:1653), CLEEFSGC (SEQ ID NO:1654), CVLEEFC (SEQ ID NO:1655), CVLEEFSC (SEQ ID NO:1656), CVLEEFSGC (SEQ ID NO:1657), CFVLEEFC (SEQ ID NO:1658), CFVLEEFSC (SEQ ID NO:1659), CFVLEEFSGC (SEQ ID NO:1660), CMFVLEEFC (SEQ ID NO:1661), CMFVLEEFSC (SEQ ID NO:1662), CMFVLEEFSGC (SEQ ID NO:1663), EEEFK (SEQ ID NO:1664), EEEFSK (SEQ ID NO:1665), EEEFSGK (SEQ ID NO:1666), ELEEFK (SEQ ID NO:1667), ELEEFSK (SEQ ID NO:1668), ELEEFSGK (SEQ ID NO:1669), EVLEEFK (SEQ ID NO:1670), EVLEEFSK (SEQ ID NO:1671), EVLEEFSGK (SEQ ID NO:1672), EFVLEEFK (SEQ ID NO:1673), EFVLEEFSK (SEQ ID NO:1674), EFVLEEFSGK (SEQ ID NO:1675), EMFVLEEFK (SEQ ID NO:1676) EMFVLEEFSK (SEQ ID NO:1677), EMFVLEEFSGK (SEQ ID NO:1678), KEEFD (SEQ ID NO:1679), KEEFSD (SEQ ID NO:1680), KEEFSGD (SEQ ID NO:1681), KLEEFD (SEQ ID NO:1682), KLEEFSD (SEQ ID NO:1683), KLEEFSGD (SEQ ID NO:1684), KVLEEFD (SEQ ID NO:1685), KVLEEFSD (SEQ ID NO:1686), KVLEEFSGD (SEQ ID NO:1687), KFVLEEFD (SEQ ID NO:1688), KFVLEEFSD (SEQ ID NO:1689), KFVLEEFSGD (SEQ ID NO:1690), KMFVLEEFD (SEQ ID NO:1691), KMFVLEEFSD (SEQ ID NO:1692), KMFVLEEFSGD (SEQ ID NO:1693), DEEFK (SEQ ID NO:1694), DEEFSK (SEQ ID NO:1695), DEEFSGK (SEQ ID NO:1696), DLEEFK (SEQ ID NO:1697), DLEEFSK (SEQ ID NO:1698), DLEEFSGK (SEQ ID NO:1699), DVLEEFK (SEQ ID NO:1700), DVLEEFSK (SEQ ID NO:1701), DVLEEFSGK (SEQ ID NO:1702), DFVLEEFK (SEQ ID NO:1703), DFVLEEFSK (SEQ ID NO:1704), DFVLEEFSGK (SEQ ID NO:1705), DMFVLEEFK (SEQ ID NO:1706), DMFVLEEFSK (SEQ ID NO:1707), DMFVLEEFSGK (SEQ ID NO:1708), KEEFE (SEQ ID NO:1709), KEEFSE (SEQ ID NO:1710), KEEFSGE (SEQ ID NO:1711), KLEEFE (SEQ ID NO:1712), KLEEFSE (SEQ ID NO:1713), KLEEFSGE (SEQ ID NO:1714), KVLEEFE (SEQ ID NO:1715), KVLEEFSE (SEQ ID NO:1716), KVLEEFSGE (SEQ ID NO:1717), KFVLEEFE (SEQ ID NO:1718), KFVLEEFSE (SEQ ID NO:1719), KFVLEEFSGE (SEQ ID NO:1720), KMFVLEEFE (SEQ ID NO:1721), KMFVLEEFSE (SEQ ID NO:1722), KMFVLEEFSGE (SEQ ID NO:1723), EEFSG (SEQ ID NO:1724), LEEFS (SEQ ID NO:1725), LEEFSG (SEQ ID NO:1726), VLEEF (SEQ ID NO:1727), VLEEFS (SEQ ID NO:1728), VLEEFSG (SEQ ID NO:1729), FVLEEF (SEQ ID NO:1730), FVLEEFS (SEQ ID NO:1731), FVLEEFSG (SEQ ID NO:1732), MFVLEEF (SEQ ID NO:1733), MFVLEEFS (SEQ ID NO:1734) and MFVLEEFSG (SEQ ID NO:1735).

[0135] Representative cyclic peptides comprising a cadherin-12 CAR sequence include: CDETC (SEQ ID NO:1736), CIDETC (SEQ ID NO:1737), CDETTC (SEQ ID NO:1738), CTIDETC (SEQ ID NO:1739), CIDETTC (SEQ ID NO:1740), CTIDETTC (SEQ ID NO:1741), CDETTGC (SEQ ID NO:1742), CIDETTGC (SEQ ID NO:1743), CTIDETTGC (SEQ ID NO:1744), CFTIDETC (SEQ ID NO:1745), CFTIDETTC (SEQ ID NO:1746), CFTIDETTGC (SEQ ID NO:1747), CVFTIDETC (SEQ ID NO:1748), CVFTIDETTC (SEQ ID NO:1749), CVFTIDETTGC (SEQ ID NO:1750), DDETK (SEQ ID NO:1752), DIDETK (SEQ ID NO:1753), DTIDETK (SEQ ID NO:1754), DFTIDETK (SEQ ID NO:1755), DVFTIDETK (SEQ ID NO:1756), EDETK (SEQ ID NO:1757), EIDETK (SEQ ID NO:1758), ETIDETK (SEQ ID NO:1759), EFTIDETK (SEQ ID NO:1760), EVFTIDETK (SEQ ID NO:1761), KDETD (SEQ ID NO:1762), KIDETD (SEQ ID NO:1763), KDETTD (SEQ ID NO:1764), KTIDETD (SEQ ID NO:1765), KIDETTD (SEQ ID NO:1766), KTIDETTD (SEQ ID NO:1767), KDETTGD (SEQ ID NO:1768), KIDETTGD (SEQ ID NO:1769), KTIDETTGD (SEQ ID NO:1770), KFTIDETD (SEQ ID NO:1771), KFTIDETTD (SEQ ID NO:1772), KFTIDETTGD (SEQ ID NO:1773), KVFTIDETD (SEQ ID NO:1774), KVFTIDETTD (SEQ ID NO:1775), KVFTIDETTGD (SEQ ID NO:1776), DDETTK (SEQ ID NO:1751), DIDETTK (SEQ ID NO:1777), DTIDETTK (SEQ ID NO:3934), DFTIDETTK (SEQ ID NO:3935), DVFTIDETTK (SEQ ID NO:3936), DDETTGK (SEQ ID NO:3937), DIDETTGK (SEQ ID NO:3938), DTIDETTGK (SEQ ID NO:3939), DFTIDETTGK (SEQ ID NO:3940), DVFTIDETTGK (SEQ ID NO:3941), EDETTK (SEQ ID NO:3942), EIDETTK (SEQ ID NO:3943), ETIDETTK (SEQ ID NO:3944), EFTIDETTK (SEQ ID NO:3945), DVFTIDETTK (SEQ ID NO:3946), EDETTGK (SEQ ID NO:3947), EIDETTGK (SEQ ID NO:3948), ETIDETTGK (SEQ ID NO:3949), EFTIDETTGK (SEQ ID NO:3950), EVFTIDETTGK (SEQ ID NO:3951), IDETT (SEQ ID NO:1778), TIDETT (SEQ ID NO:1779), DETTG (SEQ ID NO:1780), IDETTG (SEQ ID NO:1781) KDETE (SEQ ID NO:1782), KIDETE (SEQ ID NO:1783), KDETTE (SEQ ID NO:1784), KTIDETE (SEQ ID NO:1785), KIDETTE (SEQ ID NO:1786), KTIDETTE (SEQ ID NO:1787), KDETTGE (SEQ ID NO:1788), KIDETTGE (SEQ ID NO:1789), KTIDETTGE (SEQ ID NO:1790), KFTIDETE (SEQ ID NO:1791), KFTIDETTE (SEQ ID NO:1792), KFTIDETTGE (SEQ ID NO:1793), KVFTIDETE (SEQ ID NO:1794), KIFTIDETTE (SEQ ID NO:1795), KVFTIDETTGE (SEQ ID NO:1796), CDPKC (SEQ ID NO:1797), CDPKTC (SEQ ID NO:1798), CDPKTGC (SEQ ID NO:1799), CIDPKC (SEQ ID NO:1800), CIDPKTC (SEQ ID NO:1801), CIDPKTGC (SEQ ID NO:1802), CSIDPKC (SEQ ID NO:1803), CSIDPKTC (SEQ ID NO:1804), CSIDPKTGC (SEQ ID NO:1805), CFSIDPKC (SEQ ID NO:1806), CFSIDPKTC (SEQ ID NO:1807), CFSIDPKTGC (SEQ ID NO:1808), CYFSIDPKC (SEQ ID NO:1809), CYFSIDPKTC (SEQ ID NO:1810), CYFSIDPKTGC (SEQ ID NO:1811), EDPKK (SEQ ID NO:1812), EDPKTK (SEQ ID NO:1813), EDPKTGK (SEQ ID NO:1814), EIDPKK (SEQ ID NO:1815), EIDPKTK (SEQ ID NO:1816), EIDPKTGK (SEQ ID NO:1817), ESIDPKK (SEQ ID NO:1818), ESIDPKTK (SEQ ID NO:1819), ESIDPKTGK (SEQ ID NO:1820), EFSIDPKK (SEQ ID NO:1821), EFSIDPKTK (SEQ ID NO:1822), EFSIDPKTGK (SEQ ID NO:1823), EYFSIDPKK (SEQ ID NO:1824), EYFSIDPKTK (SEQ ID NO:1825), EYFSIDPKTGK (SEQ ID NO:1826), KDPKD (SEQ ID NO:1827), KDPKTD (SEQ ID NO:1828), KDPKTGD (SEQ ID NO:1829), KIDPKD (SEQ ID NO:1830), KIDPKTD (SEQ ID NO:1831), KIDPKTGD (SEQ ID NO:1832), KSIDPKD (SEQ ID NO:1833), KSIDPKTD (SEQ ID NO:1834), KSIDPKTGD (SEQ ID NO:1835), KFSIDPKD (SEQ ID NO:1836), KFSIDPKTD (SEQ ID NO:1837), KFSIDPKTGD (SEQ ID NO:1838), KYFSIDPKD (SEQ ID NO:1839), KYFSIDPKTD (SEQ ID NO:1840), KYFSIDPKTGD (SEQ ID NO:1841), DDPKK (SEQ ID NO:1842), DDPKTK (SEQ ID NO:1843), DDPKTGK (SEQ ID NO:1844), DIDPKK (SEQ ID NO:1845), DIDPKTK (SEQ ID NO:1846), DIDPKTGK (SEQ ID NO:1847), DSIDPKK (SEQ ID NO:1848), DSIDPKTK (SEQ ID NO:1849), DSIDPKTGK (SEQ ID NO:1850), DFSIDPKK (SEQ ID NO:1851), DFSIDPKTK (SEQ ID NO:1852), DFSIDPKTGK (SEQ ID NO:1853), DYFSIDPKK (SEQ ID NO:1854), DYFSIDPKTK (SEQ ID NO:1855), DYFSIDPKTGK (SEQ ID NO:1856), KDPKE (SEQ ID NO:1857), KDPKTE (SEQ ID NO:1858), KDPKTGE (SEQ ID NO:1859), KIDPKE (SEQ ID NO:1860), KIDPKTE (SEQ ID NO:1861), KIDPKTGE (SEQ ID NO:1862), KSIDPKE (SEQ ID NO:1863), KSIDPKTE (SEQ ID NO:1864), KSIDPKTGE (SEQ ID NO:1865), KFSIDPKE (SEQ ID NO:1866), KFSIDPKTE (SEQ ID NO:1867), KFSIDPKTGE (SEQ ID NO:1868), KYFSIDPKE (SEQ ID NO:1869), KYFSIDPKTE (SEQ ID NO:1870), KYFSIDPKTGE (SEQ ID NO:1871), DPKTG (SEQ ID NO:1872), IDPKT (SEQ ID NO:1873), IDPKTG (SEQ ID NO:1874), SIDPK (SEQ ID NO:1875), SIDPKT (SEQ ID NO:1876), SIDPKTG (SEQ ID NO:1877), FSIDPK (SEQ ID NO:1878), FSIDPKT (SEQ ID NO:1879), FSIDPKTG (SEQ ID NO:1880), YFSIDPK (SEQ ID NO:1881), YFSIDPKT (SEQ ID NO:1882) and YFSIDPKTG (SEQ ID NO:1883).

[0136] Representative cyclic peptides comprising a cadherin-14 CAR sequence include: CDDTC (SEQ ID NO:1884), CIDDTC (SEQ ID NO:1885), CDDTTC (SEQ ID NO:1886), CIIDDTC (SEQ ID NO:1887), CIDDTTC (SEQ ID NO:1888), CIIDDTTC (SEQ ID NO:1889), CDDTTGC (SEQ ID NO:1890), CIDDTTGC (SEQ ID NO:1891), CIIDDTTGC (SEQ ID NO:1892), CFIIDDTC (SEQ ID NO:1893), CFIIDDTTC (SEQ ID NO:1894), CFIIDDTTGC (SEQ ID NO:1895), CIFIIDDTC (SEQ ID NO:1896), CIFIIDDTTC (SEQ ID NO:1897), CIFIIDDTTGC (SEQ ID NO:1898), EDDTTK (SEQ ID NO:1899), EIDDTTK (SEQ ID NO:3952), EIIDDTTK (SEQ ID NO:3953), EFIIDDTTK (SEQ ID NO:3954), EIFIIDDTTK (SEQ ID NO:3955), EDDTTGK (SEQ ID NO:3956), EIDDTTGK (SEQ ID NO:3957), EIIDDTTGK (SEQ ID NO:3958), EFIIDDTTGK (SEQ ID NO:3959), EIFIIDDTTGK (SEQ ID NO:3960), DDDTTK (SEQ ID NO:3961), DIDDTTK (SEQ ID NO:3962), DFIIDDTTK (SEQ ID NO:3963), DIFIIDDTTK (SEQ ID NO:3964), DDDTTGK (SEQ ID NO:3965), DIDDTTGK (SEQ ID NO:3966), DIIDDTTGK (SEQ ID NO:3967), DFIIDDTTGK (SEQ ID NO:3968), DIFIIDDTTGK (SEQ ID NO:3969), DDDTK (SEQ ID NO:1900), DIDDTNK (SEQ ID NO:1901), DIIDDTK (SEQ ID NO:1902), DFIIDDTK (SEQ ID NO:1903), DIFIIDDTK (SEQ ID NO:1904), EDDTK (SEQ ID NO:1905), EIDDTK (SEQ ID NO:1906), EIIDDTK (SEQ ID NO:1907), EFIIDDTK (SEQ ID NO:1908), EIFIIDDTK (SEQ ID NO:1909), KDDTD (SEQ ID NO:1910), KIDDTD (SEQ ID NO:1911), KDDTTD (SEQ ID NO:1912), KIIDDTD (SEQ ID NO:1913), KIDDTTD (SEQ ID NO:1914), KIIDDTTD (SEQ ID NO:1915), KDDTTGD (SEQ ID NO:1916), KIDDTTGD (SEQ ID NO:1917), KIIDDTTGD (SEQ ID NO:1918), KFIIDDTD (SEQ ID NO:1919), KFIIDDTTD (SEQ ID NO:1920), KFIIDDTTGD (SEQ ID NO:1921), KIFIIDDTD (SEQ ID NO:1922), KIFIIDDTTD (SEQ ID NO:1923), KIFIIDDTTGD (SEQ ID NO:1924), DDTT (SEQ ID NO:1925), IDDTT (SEQ ID NO:1926), IIDDTT (SEQ ID NO:1927), DDTTG (SEQ ID NO:1928), IDDTTG (SEQ ID NO:1929) KDDTE (SEQ ID NO:1930), KIDDTE (SEQ ID NO:1931), KDDTTE (SEQ ID NO:1932), KIIDDTE (SEQ ID NO:1933), KIDDTTE (SEQ ID NO:1934), KIIDDTTE (SEQ ID NO:1935), KDDTTGE (SEQ ID NO:1936), KIDDTTGE (SEQ ID NO:1937), KIIDDTTGE (SEQ ID NO:1938), KFIIDDTE (SEQ ID NO:1939), KFIIDDTTE (SEQ ID NO:1940), KFIIDDTTGE (SEQ ID NO:1941), KIFIIDDTE (SEQ ID NO:1942), KIFIIDDTTE (SEQ ID NO:1943), KIFIIDDTTGE (SEQ ID NO:1944), CDPKC (SEQ ID NO:1945), CVDPKC (SEQ ID NO:1946), CVDPKTC (SEQ ID NO:1947), CVDPKTGC (SEQ ID NO:1948), CSVDPKC (SEQ ID NO:1949), CSVDPKTC (SEQ ID NO:1950), CSVDPKTGC (SEQ ID NO:1951), CFSVDPKC (SEQ ID NO:1952), CFSVDPKTC (SEQ ID NO:1953), CFSVDPKTGC (SEQ ID NO:1954), CYFSVDPKC (SEQ ID NO:1955), CYFSVDPKTC (SEQ ID NO:1956), CYFSVDPKTGC (SEQ ID NO:1957), CDPKTC (SEQ ID NO:3970), CDPKTGC (SEQ ID NO:3971), CDANC (SEQ ID NO:1958), CDANTC (SEQ ID NO:1959), CDANTGC (SEQ ID NO:1960), CIDANTC (SEQ ID NO:1961), CIDANTGC (SEQ ID NO:1962), CNIDANTC (SEQ ID NO:1963), CNIDANTGC (SEQ ID NO:1964), CFNIDANTC (SEQ ID NO:1965), CFNIDANTGC (SEQ ID NO:1966), CFFNIDANC (SEQ ID NO:1967), CFFNIDANTC (SEQ ID NO:1968), CFFNIDANTGC (SEQ ID NO:1969), CIDANC (SEQ ID NO:3972), CNIDANC (SEQ ID NO:3973), CFNIDANC (SEQ ID NO:3974), EDPKK (SEQ ID NO:1970), EDPKTK (SEQ ID NO:1971), EDPKTGK (SEQ ID NO:1972), EVDPKK (SEQ ID NO:1973), EVDPKTK (SEQ ID NO:1974), EVDPKTGK (SEQ ID NO:1975), ESVDPKK (SEQ ID NO:1976), ESVDPKTK (SEQ ID NO:1977), ESVDPKTGK (SEQ ID NO:1978), EFSVDPKK (SEQ ID NO:1979), EFSVDPKTK (SEQ ID NO:1980), EFSVDPKTGK (SEQ ID NO:1981), EYFSVDPKK (SEQ ID NO:1982), EYFSVDPKTK (SEQ ID NO:1983), EYFSVDPKTGK (SEQ ID NO:1984), EDANK (SEQ ID NO:1985), EDANTK (SEQ ID NO:1986), EDANTGK (SEQ ID NO:1987), EIDANTK (SEQ ID NO:1988), EIDANTGK (SEQ ID NO:1989), ENIDANTK (SEQ ID NO:1990), ENIDANTGK (SEQ ID NO:1991), EFNIDANTK (SEQ ID NO:1992), EFNIDANTGK (SEQ ID NO:1993), EFFNIDANK (SEQ ID NO:1994), EFFNIDANTK (SEQ ID NO:1995), EFFNIDANTGK (SEQ ID NO:1996), EIDANK (SEQ ID NO:3975), ENIDANK (SEQ ID NO:3976), EFNIDANK (SEQ ID NO:3977), KVDPKD (SEQ ID NO:1997), KVDPKTD (SEQ ID NO:1998), KVDPKTGD (SEQ ID NO:1999), KSVDPKD (SEQ ID NO:2000), KSVDPKTD (SEQ ID NO:2001), KSVDPKTGD (SEQ ID NO:2002), KFSVDPKD (SEQ ID NO:2003), KFSVDPKTD (SEQ ID NO:2004), KFSVDPKTGD (SEQ ID NO:2005), KYFSVDPKD (SEQ ID NO:2006), KYFSVDPKTD (SEQ ID NO:2007), KYFSVDPKTGD (SEQ ID NO:2008), KDPKD (SEQ ID NO:3978), KDPKTD (SEQ ID NO:3979), KDPKTGD (SEQ ID NO:3980), KDAND (SEQ ID NO:3981), KIDAND (SEQ ID NO:3982), KNIDAND (SEQ ID NO:3983), KDANTD (SEQ ID NO:2009), KDANTGD (SEQ ID NO:2010), KIDANTD (SEQ ID NO:2011), KIDANTGD (SEQ ID NO:2012), KNIDANTD (SEQ ID NO:2013), KNIDANTGD (SEQ ID NO:2014), KFNIDANTD (SEQ ID NO:2015), KFNIDANTGD (SEQ ID NO:2016), KFFNIDAND (SEQ ID NO:2017), KFFNIDANTD (SEQ ID NO:2018), KFFNIDANTGD (SEQ ID NO:2019), DDPKK (SEQ ID NO:2020), DDPKTK (SEQ ID NO:2021), DDPKTGK (SEQ ID NO:2022), DVDPKK (SEQ ID NO:2023), DVDPKTK (SEQ ID NO:2024), DVDPKTGK (SEQ ID NO:2025), DSVDPKK (SEQ ID NO:2026), DSVDPKTK (SEQ ID NO:2027), DSVDPKTGK (SEQ ID NO:2028), DFSVDPKK (SEQ ID NO:2029), DFSVDPKTK (SEQ ID NO:2030), DFSVDPKTGK (SEQ ID NO:2031), DYFSVDPKK (SEQ ID NO:2032), DYFSVDPKTK (SEQ ID NO:2033), DYFSVDPKTGK (SEQ ID NO:2034), DDANK (SEQ ID NO:2035), DDANTK (SEQ ID NO:2036), DDANTGK (SEQ ID NO:2037), DIDANTK (SEQ ID NO:2038), DIDANTGK (SEQ ID NO:2039), DNIDANTK (SEQ ID NO:2040), DNIDANTGK (SEQ ID NO:2041), DFNIDANTC (SEQ ID NO:2042), DFNIDANTGK (SEQ ID NO:2043), DFFNIDANK (SEQ ID NO:2044), DFFNIDANTK (SEQ ID NO:2045), DFFNIDANTGK (SEQ ID NO:2046), DIDANK (SEQ ID NO:3984), DNIDANK (SEQ ID NO:3985), DFNIDANK (SEQ ID NO:3986), DFNIDANTK (SEQ ID NO:3987), KDPKE (SEQ ID NO:3988), KDPKTE (SEQ ID NO:3989), KDPKTGE (SEQ ID NO:3990), KVDPKE (SEQ ID NO:2047), KVDPKTE (SEQ ID NO:2048), KVDPKTGE (SEQ ID NO:2049), KSVDPKE (SEQ ID NO:2050), KSVDPKTE (SEQ ID NO:2051), KSVDPKTGE (SEQ ID NO:2052), KFSVDPKE (SEQ ID NO:2053), KFSVDPKTE (SEQ ID NO:2054), KFSVDPKTGE (SEQ ID NO:2055), KYFSVDPKE (SEQ ID NO:2056), KYFSVDPKTE (SEQ ID NO:2057), KYFSVDPKTGE (SEQ ID NO:2058), KDANE (SEQ ID NO:2059), KDANTE (SEQ ID NO:2060), KDANTGE (SEQ ID NO:2061), KIDANTE (SEQ ID NO:2062), KIDANTGE (SEQ ID NO:2063), KNIDANTE (SEQ ID NO:2064), KNIDANTGE (SEQ ID NO:2065), KFNIDANTE (SEQ ID NO:2066), KFNIDANTGE (SEQ ID NO:2067), KFFNIDANE (SEQ ID NO:2068), KFFNIDANTE (SEQ ID NO:2069), KFFNIDANTGE (SEQ ID NO:2070), KIDANE (SEQ ID NO:3991), KNIDANE (SEQ ID NO:3992), KFNIDANE (SEQ ID NO:3993), VDPKT (SEQ ID NO:2071), VDPKTG (SEQ ID NO:2072), SVDPK (SEQ ID NO:2073), SVDPKT (SEQ ID NO:2074), SVDPKTG (SEQ ID NO:2075), FSVDPK (SEQ ID NO:2076), FSVDPKT (SEQ ID NO:2077), FSVDPKTG (SEQ ID NO:2078), YFSVDPK (SEQ ID NO:2079), YFSVDPKT (SEQ ID NO:2080), YFSVDPKTG (SEQ ID NO:2081), DANTG (SEQ ID NO:2082), IDANT (SEQ ID NO:2083), IDANTG (SEQ ID NO:2084), NIDANT (SEQ ID NO:2085), NIDANTG (SEQ ID NO:2086), FNIDANT (SEQ ID NO:2087), FNIDANTG (SEQ ID NO:2088), FFNIDAN (SEQ ID NO:2089), FFNIDANT (SEQ ID NO:2090), and FFNIDANTG (SEQ ID NO:2091).

[0137] Representative cyclic peptides comprising a cadherin-15 CAR sequence include: CDKFC (SEQ ID NO:2092), CIDKFC (SEQ ID NO:2093), CDKFTC (SEQ ID NO:2094), CSIDKFC (SEQ ID NO:2095), CIDKFTC (SEQ ID NO:2096), CSIDKFTC (SEQ ID NO:2097), CDKFTGC (SEQ ID NO:2098), CIDKFTGC (SEQ ID NO:2099), CSIDKFTGC (SEQ ID NO:2100), CFSIDKFC (SEQ ID NO:2101), CFSIDKFTC (SEQ ID NO:2102), CFSIDKFTGC (SEQ ID NO:2103), CVFSIDKFC (SEQ ID NO:2104), CVFSIDKFTC (SEQ ID NO:2105), CVFSIDKFTGC (SEQ ID NO:2106), DDKFK (SEQ ID NO:2108), DIDKFK (SEQ ID NO:2109), DSIDKFK (SEQ ID NO:2110), DFSIDKFK (SEQ ID NO:2111), DVFSIDKFK (SEQ ID NO:2112), DDKFTK (SEQ ID NO:2107), DIDKFTK (SEQ ID NO:2133), DSIDKFTK (SEQ ID NO:3994), DFSIDKFTK (SEQ ID NO:3995), DVFSIDKFTK (SEQ ID NO:3996), DDKTGK (SEQ ID NO:3997), DIDKFTGK (SEQ ID NO:3998), DSIDKFTGK (SEQ ID NO:3999), DFSIDKFTGK (SEQ ID NO:4000), DVFSIDKFTGK (SEQ ID NO:4001), EDKFTK (SEQ ID NO:4002), EIDKFTK (SEQ ID NO:4003), ESIDKFTK (SEQ ID NO:4004), EFSIDKFTK (SEQ ID NO:4005), EVFSIDKFTK (SEQ ID NO:4006), EDKFTGK (SEQ ID NO:4007), EIDKFTGK (SEQ ID NO:4008), EFSIDKFTGK (SEQ ID NO:4009), EVFSIDKFTGK (SEQ ID NO:4010), EDKFK (SEQ ID NO:2113), EIDKFK (SEQ ID NO:2114), ESIDKFK (SEQ ID NO:2115), EFSIDKFK (SEQ ID NO:2116), EVFSIDKFK (SEQ ID NO:2117), KDKFD (SEQ ID NO:2118), KIDKFD (SEQ ID NO:2119), KDKFTD (SEQ ID NO:2120), KSIDKFD (SEQ ID NO:2121), KIDKFTD (SEQ ID NO:2122), KSIDKFTD (SEQ ID NO:2123), KDKFTGD (SEQ ID NO:2124), KIDKFTGD (SEQ ID NO:2125), KSIDKFTGD (SEQ ID NO:2126), KFSIDKFD (SEQ ID NO:2127), KFSIDKFTD (SEQ ID NO:2128), KFSIDKFTGD (SEQ ID NO:2129), KVFSIDKFD (SEQ ID NO:2130), KVFSIDKFTD (SEQ ID NO:2131), KVFSIDKFTGD (SEQ ID NO:2132), IDKFT (SEQ ID NO:2134), SIDKFT (SEQ ID NO:2135), DKFTG (SEQ ID NO:2136), IDKFTG (SEQ ID NO:2137) KDKFE (SEQ ID NO:2138), KIDKFE (SEQ ID NO:2139), KDKFTE (SEQ ID NO:2140), KSIDKFE (SEQ ID NO:2141), KIDKFTE (SEQ ID NO:2142), KSIDKFTE (SEQ ID NO:2143), KDKFTGE (SEQ ID NO:2144), KIDKFTGE (SEQ ID NO:2145), KSIDKFTGE (SEQ ID NO:2146), KFSIDKFE (SEQ ID NO:2147), KFSIDKFTE (SEQ ID NO:2148), KFSIDKFTGE (SEQ ID NO:2149), KVFSIDKFE (SEQ ID NO:2150), KIFSIDKFTE (SEQ ID NO:2151), KVFSIDKFTGE (SEQ ID NO:2152), CDELC (SEQ ID NO:2153), CDELTC (SEQ ID NO:2154), CDELTGC (SEQ ID NO:2155), CIDELC (SEQ ID NO:2156), CIDELTC (SEQ ID NO:2157), CIDELTGC (SEQ ID NO:2158), CSIDELC (SEQ ID NO:2159), CSIDELTC (SEQ ID NO:2160), CSIDELTGC (SEQ ID NO:2161), CFSIDELC (SEQ ID NO:2162), CFSIDELTC (SEQ ID NO:2163), CFSIDELTGC (SEQ ID NO:2164), CLFSIDELC (SEQ ID NO:2165), CLFSIDELTC (SEQ ID NO:2166), CLFSIDELTGC (SEQ ID NO:2167), EDELCK (SEQ ID NO:2168), EDELTK (SEQ ID NO:2169), EDELTGK (SEQ ID NO:2170), EIDELK (SEQ ID NO:2171), EIDELTK (SEQ ID NO:2172), EIDELTGK (SEQ ID NO:2173), ESIDELK (SEQ ID NO:2174), ESIDELTK (SEQ ID NO:2175), ESIDELTGK (SEQ ID NO:2176), EFSIDELK (SEQ ID NO:2177), EFSIDELTK (SEQ ID NO:2178), EFSIDELTGK (SEQ ID NO:2179), ELFSIDELK (SEQ ID NO:2180), ELFSIDELTK (SEQ ID NO:2181), ELFSIDELTGK (SEQ ID NO:2182), KDELD (SEQ ID NO:2183), KDELTD (SEQ ID NO:2184), KDELTGD (SEQ ID NO:2185), KIDELD (SEQ ID NO:2186), KIDELTD (SEQ ID NO:2187), KIDELTGD (SEQ ID NO:2188), KSIDELD (SEQ ID NO:2189), KSIDELTD (SEQ ID NO:2190), KSIDELTGD (SEQ ID NO:2191), KFSIDELD (SEQ ID NO:2192), KFSIDELTD (SEQ ID NO:2193), KFSIDELTGD (SEQ ID NO:2194), KLFSIDELD (SEQ ID NO:2195), KLFSIDELTD (SEQ ID NO:2196), KLFSIDELTGD (SEQ ID NO:2197), DDELK (SEQ ID NO:2198), DDELTK (SEQ ID NO:2199), DDELTGK (SEQ ID NO:2200), DIDELK (SEQ ID NO:2201), DIDELTK (SEQ ID NO:2202), DIDELTGK (SEQ ID NO:2203), DSIDELK (SEQ ID NO:2204), DSIDELTK (SEQ ID NO:2205), DSIDELTGK (SEQ ID NO:2206), DFSIDELK (SEQ ID NO:2207), DFSIDELTK (SEQ ID NO:2208), DFSIDELTGK (SEQ ID NO:2209), DLFSIDELK (SEQ ID NO:2210), DLFSIDELTK (SEQ ID NO:2211), DLFSIDELTGK (SEQ ID NO:2212), KDELE (SEQ ID NO:2213), KDELTE (SEQ ID NO:2214), KDELTGE (SEQ ID NO:2215), KIDELE (SEQ ID NO:2216), KIDELTE (SEQ ID NO:2217), KIDELTGE (SEQ ID NO:2218), KSIDELE (SEQ ID NO:2219), KSIDELTE (SEQ ID NO:2220), KSIDELTGE (SEQ ID NO:2221), KFSIDELE (SEQ ID NO:2222), KFSIDELTE (SEQ ID NO:2223), KFSIDELTGE (SEQ ID NO:2224), KLFSIDELE (SEQ ID NO:2225), KLFSIDELTE (SEQ ID NO:2226), KLFSIDELTGE (SEQ ID NO:2227), DELTG (SEQ ID NO:2228), IDELT (SEQ ID NO:2229), IDELTG (SEQ ID NO:2230), SIDEL (SEQ ID NO:2231), SIDELT (SEQ ID NO:2232), SIDELTG (SEQ ID NO:2233), FSIDEL (SEQ ID NO:2234), FSIDELT (SEQ ID NO:2235), FSIDELTG (SEQ ID NO:2236), LFSIDEL (SEQ ID NO:2237), LFSIDELT (SEQ ID NO:2238) and LFSIDELTG (SEQ ID NO:2239).

[0138] Representative cyclic peptides comprising a T-cadherin CAR sequence include: CNENC (SEQ ID NO:2240), CINENC (SEQ ID NO:2241), CNENTC (SEQ ID NO:2242), CRINENC (SEQ ID NO:2243), CINENTC (SEQ ID NO:2244), CRINENTC (SEQ ID NO:2245), CNENTGC (SEQ ID NO:2246), CINENTGC (SEQ ID NO:2247), CRINENTGC (SEQ ID NO:2248), CFRINENC (SEQ ID NO:2249), CFRINENTC (SEQ ID NO:2250), CFRINENTGC (SEQ ID NO:2251), CIFRINENC (SEQ ID NO:2252), CIFRINENTC (SEQ ID NO:2253), CIFRINENTGC (SEQ ID NO:2254), DNENK (SEQ ID NO:2255), DINENK (SEQ ID NO:2256), DRINENK (SEQ ID NO:2257), DFRINENK (SEQ ID NO:2258), DIFRINENK (SEQ ID NO:2259), ENENK (SEQ ID NO:2260), EINENK (SEQ ID NO:2261), ERINENK (SEQ ID NO:2262), EFRINENK (SEQ ID NO:2263), EIFRINENK (SEQ ID NO:2264), KNEND (SEQ ID NO:2265), KINEND (SEQ ID NO:2266), KNENTD (SEQ ID NO:2267), KRINEND (SEQ ID NO:2268), KINENTD (SEQ ID NO:2269), KRINENTD (SEQ ID NO:2270), KNENTGD (SEQ ID NO:2271), KINENTGD (SEQ ID NO:2272), KRINENTGD (SEQ ID NO:2273), KFRINEND (SEQ ID NO:2274), KFRINENTD (SEQ ID NO:2275), KFRINENTGD (SEQ ID NO:2276), KIFRINEND (SEQ ID NO:2277), KIFRINENTD (SEQ ID NO:2278), KIFRINENTGD (SEQ ID NO:2279), DNENTK (SEQ ID NO:4011), DINENTK (SEQ ID NO:4012), DRINENTK (SEQ ID NO:4013), DFRINENTK (SEQ ID NO:4014), DIFRINENTK (SEQ ID NO:4015), DNENTGK (SEQ ID NO:4016), DINENTGK (SEQ ID NO:4017), DRINENTGK (SEQ ID NO:4018), DFRINENTGK (SEQ ID NO:4019), DIFRINENTGK (SEQ ID NO:4020), ENENTK (SEQ ID NO:4021), EINENTK (SEQ ID NO:4022), ERINENTK (SEQ ID NO:4023), EFRINENTK (SEQ ID NO:4024), EIFRINENTK (SEQ ID NO:4025), ENENTGK (SEQ ID NO:4026), EINENTGK (SEQ ID NO:4027), ERINENTGK (SEQ ID NO:4028), EFRINENTGK (SEQ ID NO:4029), EIFRINENTGK (SEQ ID NO:4030), VNENTG (SEQ ID NO:4031), RINENTG (SEQ ID NO:4032), FRINEN (SEQ ID NO:4033), FRINENT (SEQ ID NO:4034), FRINENTG (SEQ ID NO:4035), IFRINEN (SEQ ID NO:4036), IFRINENT (SEQ ID NO:4037), IFRINENTG (SEQ ID NO:4038), VNENT (SEQ ID NO:2280), INENT (SEQ ID NO:2281), RINENT (SEQ ID NO:2282), NENTG (SEQ ID NO:2283), INENTG (SEQ ID NO:2284) KNENE (SEQ ID NO:2285), KINENE (SEQ ID NO:2286), KNENTE (SEQ ID NO:2287), KRINENE (SEQ ID NO:2288), KINENTE (SEQ ID NO:2289), KRINENTE (SEQ ID NO:2290), KNENTGE (SEQ ID NO:2291), KINENTGE (SEQ ID NO:2292), KRINENTGE (SEQ ID NO:2293), KFRINENE (SEQ ID NO:2294), KFRINENTE (SEQ ID NO:2295), KFRINENTGE (SEQ ID NO:2296), KIFRINENE (SEQ ID NO:2297), KIFRINENTE (SEQ ID NO:2298) and KIFRINENTGE (SEQ ID NO:2299).

[0139] Representative cyclic peptides comprising a PB-cadherin CAR sequence include: CEEYC (SEQ ID NO:2300), CEEYTC (SEQ ID NO:2301), CEEYTG (SEQ ID NO:2302), CVEEYC (SEQ ID NO:2303), CVEEYTC (SEQ ID NO:2304), CVEEYTGC (SEQ ID NO:2305), CVVEEYC (SEQ ID NO:2306), CVVEEYTC (SEQ ID NO:2307), CVVEEYTGC (SEQ ID NO:2308), CFVVEEYC (SEQ ID NO:2309), CFVEEYTC (SEQ ID NO:2310), CFVEEYTGC (SEQ ID NO:2311), CFFVVEEYC (SEQ ID NO:2312), CFFVVEEYTC (SEQ ID NO:2313), CFFVVEEYTGC (SEQ ID NO:2314), CLIDELC (SEQ ID NO:2315), CLIDELTC (SEQ ID NO:2316), CLIDELTGC (SEQ ID NO:2317), CFLIDELC (SEQ ID NO:2318), CFLIDELTC (SEQ ID NO:2319), CFLIDELTGC (SEQ ID NO:2320), CIFLIDELC (SEQ ID NO:2321), CIFLIDELTC (SEQ ID NO:2322), CIFLIDELTGC (SEQ ID NO:2323), CDELC (SEQ ID NO:4039), CDELTC (SEQ ID NO:4040), CDELTGC (SEQ ID NO:4041), CIDELC (SEQ ID NO:4042), CIDELTC (SEQ ID NO:4043), CIDELTGC (SEQ ID NO:4044), CDPKC (SEQ ID NO:4045), CDPKTC (SEQ ID NO:4046), CDPKTGC (SEQ ID NO:4047), CVDPKC (SEQ ID NO:4048), CVDPKTC (SEQ ID NO:4049), CVDPKTGC (SEQ ID NO:4050), CTVDPKC (SEQ ID NO:2324), CTVDPKTC (SEQ ID NO:2325), CTVDPKTGC (SEQ ID NO:2326), CFTVDPKC (SEQ ID NO:2327), CFTVDPKTC (SEQ ID NO:2328), CFTVDPKTGC (SEQ ID NO:2329), CHFTVDPKC (SEQ ID NO:2330), CHFTVDPKTC (SEQ ID NO:2331), CHFTVDPKTGC (SEQ ID NO:2332), CDADC (SEQ ID NO:2333), CDADTC (SEQ ID NO:2334), CDADTGC (SEQ ID NO:2335), CIDADC (SEQ ID NO:2336), CIDADTC (SEQ ID NO:2337), CIDADTGC (SEQ ID NO:2338), CDIDADC (SEQ ID NO:2339), CDIDADTC (SEQ ID NO:2340), CDIDADTGC (SEQ ID NO:2341), CFDIDADC (SEQ ID NO:2342), CFDIDADTC (SEQ ID NO:2343), CFDIDADTGC (SEQ ID NO:2344), CIFDIDADC (SEQ ID NO:2345), CIFDIDADTC (SEQ ID NO:2346), CIFDIDADTGC (SEQ ID NO:2347), EEEYK (SEQ ID NO:2348), EEEYTK (SEQ ID NO:2349), EEEYTGK (SEQ ID NO:2350), EVEEYK (SEQ ID NO:2351), EVEEYTK (SEQ ID NO:2352), EVEEYTGK (SEQ ID NO:2353), EVVEEYK (SEQ ID NO:2354), EVVEEYTK (SEQ ID NO:2355), EVVEEYTGK (SEQ ID NO:2356), EFVVEEYK (SEQ ID NO:2357), EFVEEYTK (SEQ ID NO:2358), EFVEEYTGK (SEQ ID NO:2359), EFFVVEEYK (SEQ ID NO:2360), EFFVVEEYTK (SEQ ID NO:2361), EFFVVEEYTGK (SEQ ID NO:2362), EDELK (SEQ ID NO:2363), EDELTK (SEQ ID NO:2364), EDELTGK (SEQ ID NO:2365), EIDELK (SEQ ID NO:2366), EIDELTK (SEQ ID NO:2367), EIDELTGK (SEQ ID NO:2368), ELIDELK (SEQ ID NO:2369), ELIDELTK (SEQ ID NO:2370), ELIDELTGK (SEQ ID NO:2371), EFLIDELK (SEQ ID NO:2372), EFLIDELTK (SEQ ID NO:2373), EFLIDELTGK (SEQ ID NO:2374), EIFLIDELK (SEQ ID NO:2375), EIFLIDELTK (SEQ ID NO:2376), EIFLIDELTGK (SEQ ID NO:2377), EDPKK (SEQ ID NO:2378), EDPKTK (SEQ ID NO:2379), EDPKTGK (SEQ ID NO:2380), EVDPKK (SEQ ID NO:2381), EVDPKTK (SEQ ID NO:2382), EVDPKTGK (SEQ ID NO:2383), ETVDPKK (SEQ ID NO:2384), ETVDPKTK (SEQ ID NO:2385), ETVDPKTGK (SEQ ID NO:2386), EFTVDPKK (SEQ ID NO:2387), EFTVDPKTK (SEQ ID NO:2388), EFTVDPKTGK (SEQ ID NO:2389), EHFTVDPKK (SEQ ID NO:2390), EHFTVDPKTK (SEQ ID NO:2391), EHFTVDPKTGK (SEQ ID NO:2392), EDADK (SEQ ID NO:2393), EDADTK (SEQ ID NO:2394), EDADTGK (SEQ ID NO:2395), EIDADK (SEQ ID NO:2396), EIDADTK (SEQ ID NO:2397), EIDADTGK (SEQ ID NO:2398), EDIDADK (SEQ ID NO:2399), EDIDADTK (SEQ ID NO:2400), EDIDADTGK (SEQ ID NO:2401), EFDIDADK (SEQ ID NO:2402), EFDIDADTK (SEQ ID NO:2403), EFDIDADTGK (SEQ ID NO:2404), EIFDIDADK (SEQ ID NO:2405), EIFDIDADTK (SEQ ID NO:2406), EIFDIDADTGK (SEQ ID NO:2407), KEEYD (SEQ ID NO:2408), KEEYTD (SEQ ID NO:2409), KEEYTGD (SEQ ID NO:2410), KVEEYD (SEQ ID NO:2411), KVEEYTD (SEQ ID NO:2412), KVEEYTGD (SEQ ID NO:2413), KVVEEYD (SEQ ID NO:2414), KVVEEYTD (SEQ ID NO:2415), KVVEEYTGD (SEQ ID NO:2416), KFVVEEYD (SEQ ID NO:2417), KFVEEYTD (SEQ ID NO:2418), KFVEEYTGD (SEQ ID NO:2419), KFFVVEEYD (SEQ ID NO:2420), KFFVVEEYTD (SEQ ID NO:2421), KFFVVEEYTGD (SEQ ID NO:2422), KDELD (SEQ ID NO:2423), KDELTD (SEQ ID NO:2424), KDELTGD (SEQ ID NO:2425), KIDELD (SEQ ID NO:2426), KIDELTD (SEQ ID NO:2427), KIDELTGD (SEQ ID NO:2428), KLIDELD (SEQ ID NO:2429), KLIDELTD (SEQ ID NO:2430), KLIDELTGD (SEQ ID NO:2431), KFLIDELD (SEQ ID NO:2432), KFLIDELTD (SEQ ID NO:2433), KFLIDELTGD (SEQ ID NO:2434), KIFLIDELD (SEQ ID NO:2435), KIFLIDELTD (SEQ ID NO:2436), KIFLIDELTGD (SEQ ID NO:2437), KDPKD (SEQ ID NO:2438), KDPKTD (SEQ ID NO:2439), KDPKTGD (SEQ ID NO:2440), KVDPKD (SEQ ID NO:2441), KVDPKTD (SEQ ID NO:2442), KVDPKTGD (SEQ ID NO:2443), KTVDPKD (SEQ ID NO:2444), KTVDPKTD (SEQ ID NO:2445), KTVDPKTGD (SEQ ID NO:2446), KFTVDPKD (SEQ ID NO:2447), KFTVDPKTD (SEQ ID NO:2448), KFTVDPKTGD (SEQ ID NO:2449), KHFTVDPKD (SEQ ID NO:2450), KHFTVDPKTD (SEQ ID NO:2451), KHFTVDPKTGD (SEQ ID NO:2452), KDADD (SEQ ID NO:2453), KDADTD (SEQ ID NO:2454), KDADTGD (SEQ ID NO:2455), KIDADD (SEQ ID NO:2456), KIDADTD (SEQ ID NO:2457), KIDADTGD (SEQ ID NO:2458), KDIDADD (SEQ ID NO:2459), KDIDADTD (SEQ ID NO:2460), KDIDADTGD (SEQ ID NO:2461), KFDIDADD (SEQ ID NO:2462), KFDIDADTD (SEQ ID NO:2463), KFDIDADTGD (SEQ ID NO:2464), KIFDIDADD (SEQ ID NO:2465), KIFDIDADTD (SEQ ID NO:2466), KIFDIDADTGD (SEQ ID NO:2467), DEEYK (SEQ ID NO:2468), DEEYTK (SEQ ID NO:2469), DEEYTGK (SEQ ID NO:2470), DVEEYK (SEQ ID NO:2471), DVEEYTK (SEQ ID NO:2472), DVEEYTGK (SEQ ID NO:2473), DVVEEYK (SEQ ID NO:2474), DVVEEYTK (SEQ ID NO:2475), DVVEEYTGK (SEQ ID NO:2476), DFVVEEYK (SEQ ID NO:2477), DFVEEYTK (SEQ ID NO:2478), DFVEEYTGK (SEQ ID NO:2479), DFFVVEEYK (SEQ ID NO:2480), DFFVVEEYTK, (SEQ ID NO:2481), DFFVVEEYTGK (SEQ ID NO:2482), DDELK (SEQ ID NO:2483), DDELTK (SEQ ID NO:2484), DDELTGK (SEQ ID NO:2485), DIDELK (SEQ ID NO:2486), DIDELTK (SEQ ID NO:2487), DIDELTGK (SEQ ID NO:2488), DLIDELK (SEQ ID NO:2489), DLIDELTK (SEQ ID NO:2490), DLIDELTGK (SEQ ID NO:2491), DFLIDELK (SEQ ID NO:2492), DFLIDELTK (SEQ ID NO:2493), DFLIDELTGK (SEQ ID NO:2494), DIFLIDELK (SEQ ID NO:2495), DIFLIDELTK (SEQ ID NO:2496), DIFLIDELTGK (SEQ ID NO:2497), DDPKK (SEQ ID NO:2498), DDPKTK (SEQ ID NO:2499), DDPKTGK (SEQ ID NO:2500), DVDPKK (SEQ ID NO:2501), DVDPKYK (SEQ ID NO:2502), DVTPKTGK (SEQ ID NO:2503), DTVDPKK (SEQ ID NO:2504), DTVDPKTK (SEQ ID NO:2505), DTVDPKTGK (SEQ ID NO:2506), DFTVDPKK (SEQ ID NO:2507), DFTVDPKTK (SEQ ID NO:2508), DFTVDPKTGK (SEQ ID NO:2509), DHFTVDPKK (SEQ ID NO:2510), DHFTVDPKTK (SEQ ID NO:2511), DHFTVDPKTGK (SEQ ID NO:2512), DDADK (SEQ ID NO:2513), DDADTK (SEQ ID NO:2514), DDADTGK (SEQ ID NO:2515), DIDADK (SEQ ID NO:2516), DIDADTK (SEQ ID NO:2517), DIDADTGK (SEQ ID NO:2518), DDIDADK (SEQ ID NO:2519), DDIDADTK (SEQ ID NO:2520), DDIDADTGK (SEQ ID NO:2521), DFDIDADK (SEQ ID NO:2522), DFDIDADTK (SEQ ID NO:2523), DFDIDADTGK (SEQ ID NO:2524), DIFDIDADK (SEQ ID NO:2525), DIFDIDADTK (SEQ ID NO:2526), DIFDIDADTGK (SEQ ID NO:2527), KEEYE (SEQ ID NO:2528), KEEYTE (SEQ ID NO:2529), KEEYTGE (SEQ ID NO:2530), KVEEYE (SEQ ID NO:2531), KVEEYTE (SEQ ID NO:2532), KVEEYTGE (SEQ ID NO:2533), KVVEEYE (SEQ ID NO:2534), KVVEEYTE (SEQ ID NO:2535), KVVEEYTGE (SEQ ID NO:2536), KFVVEEYE (SEQ ID NO:2537), KFVEEYTE (SEQ ID NO:2538), KFVEEYTGE (SEQ ID NO:2539), KFFVVEEYE (SEQ ID NO:2540), KFFVVEEYTE (SEQ ID NO:2541), KFFVVEEYTGE (SEQ ID NO:2542), KDELE (SEQ ID NO:2543), KDELTE (SEQ ID NO:2544), KDELTGE (SEQ ID NO:2545), KIDELE (SEQ ID NO:2546), KIDELTE (SEQ ID NO:2547), KIDELTGE (SEQ ID NO:2548), KLIDELE (SEQ ID NO:2549), KLIDELTE (SEQ ID NO:2550), KLIDELTGE (SEQ ID NO:2551), KFLIDELE (SEQ ID NO:2552), KFLIDELTE (SEQ ID NO:2553), KFLIDELTGE (SEQ ID NO:2554), KIFLIDELE (SEQ ID NO:2555), KIFLIDELTE (SEQ ID NO:2556), KIFLIDELTGE (SEQ ID NO:2557), KDPKE (SEQ ID NO:2558), KDPKTE (SEQ ID NO:2559), KDPKTGE (SEQ ID NO:2560), KVDPKE (SEQ ID NO:2561), KVDPKTE (SEQ ID NO:2562), KDPKTGE (SEQ ID NO:2563), KTVDPKE (SEQ ID NO:2564), KTVDPKTE (SEQ ID NO:2565), KTVDPKTGE (SEQ ID NO:2566), KFTVDPKE (SEQ ID NO:2567), KFTVDPKTE (SEQ ID NO:2568), KFTVDPKTGE (SEQ ID NO:2569), KHFTVDPKE (SEQ ID NO:2570), KHFTVDPKTE (SEQ ID NO:2571), KHFTVDPKTGE (SEQ ID NO:2572), KDADE (SEQ ID NO:2573), KDADTE (SEQ ID NO:2574), KDADTGE (SEQ ID NO:2575), KIDADE (SEQ ID NO:2576), KIDADTE (SEQ ID NO:2577), KIDADTGE (SEQ ID NO:2578), KDIDADE (SEQ ID NO:2579), KDIDADTE (SEQ ID NO:2580), KDIDADTGE (SEQ ID NO:2581), KFDIDADE (SEQ ID NO:2582), KFDIDADTE (SEQ ID NO:2583), KFDIDADTGE (SEQ ID NO:2584), KIFDIDADE (SEQ ID NO:2585), KIFDIDADTE (SEQ ID NO:2586), KIFDIDADTGE (SEQ ID NO:2587), VEEYT (SEQ ID NO:2588), VEEYTG (SEQ ID NO:2589), VVEEY (SEQ ID NO:2590), VVEEYT (SEQ ID NO:2591), VVEEYTG (SEQ ID NO:2592), FVVEEY (SEQ ID NO:2593), FVEEYT (SEQ ID NO:2594), FVEEYTG (SEQ ID NO:2595), FFVVEEY (SEQ ID NO:2596), FFVVEEYT (SEQ ID NO:2597), FFVVEEYTG (SEQ ID NO:2598), LIDEL (SEQ. ID NO:2599), LIDELT (SEQ ID NO:2600), LIDELTG (SEQ ID NO:2601), FLIDEL (SEQ ID NO:2602), FLIDELT (SEQ ID NO:2603), FLIDELTG (SEQ ID NO:2604), IFLIDEL (SEQ ID NO:2605), IFLIDELT (SEQ ID NO:2606), IFLIDELTG (SEQ ID NO:2607), TVDPK (SEQ ID NO:2608), TVDPKT (SEQ ID NO:2609), TVDPKTG (SEQ ID NO:2610), FTVDPK (SEQ ID NO:2611), FTVDPKT (SEQ ID NO:2612), FTVDPKTG (SEQ ID NO:2613), HFTVDPK (SEQ ID NO:2614), HFTVDPKT (SEQ ID NO:2615), HFTVDPKTG (SEQ ID NO:2616), DADTG (SEQ ID NO:2617), IDADT (SEQ ID NO:2618), IDADTG (SEQ ID NO:2619), DIDAD (SEQ ID NO:2620), DIDADT (SEQ ID NO:2621), DIDADTG (SEQ ID NO:2622), FDIDAD (SEQ ID NO:2623), FDIDADT (SEQ ID NO:2624), FDIDADTG (SEQ ID NO:2625), IFDIDAD (SEQ ID NO:2626), IFDIDADT (SEQ ID NO:2627) and IFDIDADTG (SEQ ID NO:2628).

[0140] Representative cyclic peptides comprising a LI-cadherin CAR sequence include: CNNKC (SEQ ID NO:2629), CNNKTC (SEQ ID NO:2630), CNNKTGC (SEQ ID NO:2631), CINNKC (SEQ ID NO:2632), CINNKTC (SEQ ID NO:2633), CINNKTGC (SEQ ID NO:2634), CQINNKC (SEQ ID NO:2635), CQINNKTC (SEQ ID NO:2636), CQINNKTGC (SEQ ID NO:2637), CFQINNKC (SEQ ID NO:2638), CFQINNKTC (SEQ ID NO:2639), CFQINNKTGC (SEQ ID NO:2640), CYFQINNKC (SEQ ID NO:2641), CYFQINNKTC (SEQ ID NO:2642), CYFQINNKTGC (SEQ ID NO:2643), ENNKK (SEQ ID NO:2644), ENNKTK (SEQ ID NO:2645), ENNKTGK (SEQ ID NO:2646), EINNKK (SEQ ID NO:2647), EINNKTK (SEQ ID NO:2648), EINNKTGK (SEQ ID NO:2649), EQINNKK (SEQ ID NO:2650), EQINNKTK (SEQ ID NO:2651), EQINNKTGK (SEQ ID NO:2652), EFQNNKK (SEQ ID NO:2653), EFQINNKTK (SEQ ID NO:2654), EFQINNKTGK (SEQ ID NO:2655), EYFQINNKK (SEQ ID NO:2656), EYFQINNKTK (SEQ ID NO:2657), EYFQINNKTGK (SEQ ID NO:2658), KNNKD (SEQ ID NO:2659), KNNKTD (SEQ ID NO:2660), KNNKTGD (SEQ ID NO:2661), KINNKD (SEQ ID NO:2662), KINNKTD (SEQ ID NO:2663), KINNKTGD (SEQ ID NO:2664), KQINNKD (SEQ ID NO:2665), KQINNKTD (SEQ ID NO:2666), KQINNKTGD (SEQ ID NO:2667), KFQINNKD (SEQ ID NO:2668), KFQINNKTD (SEQ ID NO:2669), KFQINNKTGD (SEQ ID NO:2670), KYFQINNKD (SEQ ID NO:2671), KYFQINNKTD (SEQ ID NO:2672), KYFQINNKTGD (SEQ ID NO:2673), DNNKK (SEQ ID NO:2674), DNNKTK (SEQ ID NO:2675), DNNKTGK (SEQ ID NO:2676), DINNKK (SEQ ID NO:2677), DINNKTK (SEQ ID NO:2678), DINNKTGK (SEQ ID NO:2679), DQINNKK (SEQ ID NO:2680), DQINNKTK (SEQ ID NO:2681), DQINNKTGK (SEQ ID NO:2682), DFQINNKK (SEQ ID NO:2683), DFQINNKTK (SEQ ID NO:2684), DFQINNKTGK (SEQ ID NO:2685), DYFQINNKK (SEQ ID NO:2686), DYFQINNKTK (SEQ ID NO:2687), DYFQINNKTGK (SEQ ID NO:2688), KNNKE (SEQ ID NO:2689), KNNKTE (SEQ ID NO:2690), KNNKTGE (SEQ ID NO:2691), KINNKE (SEQ ID NO:2692), KINNKTE (SEQ ID NO:2693), KINNKTGE (SEQ ID NO:2694), KQINNKE (SEQ ID NO:2695), KQINNKTE (SEQ ID NO:2696), KQINNKTGE (SEQ ID NO:2697), KFQINNKE (SEQ ID NO:2698), KFQINNKTE (SEQ ID NO:2699), KFQINNKTGE (SEQ ID NO:2700), KYFQINNKE (SEQ ID NO:2701), KYFQINNKTE (SEQ ID NO:2702), KYFQINNKTGE (SEQ ID NO:2703), NNKTG (SEQ ID NO:2704), INNKT (SEQ ID NO:2705), INNKTG (SEQ ID NO:2706), QINNK (SEQ ID NO:2707), QINNKT (SEQ ID NO:2708), QINNKTG (SEQ ID NO:2709), FQINNK (SEQ ID NO:2710), FQINNKT (SEQ ID NO:2711), FQINNKTG (SEQ ID NO:2712), YFQINNK (SEQ ID NO:2713), YFQINNKT (SEQ ID NO:2714) and YFQINNKTG (SEQ ID NO:2715).

[0141] Representative cyclic peptides comprising a protocadherin CAR sequence include: CDLVC (SEQ ID NO:2716), CDLVTC (SEQ ID NO:2717), CDLVTGC (SEQ ID NO:2718), CLDLVC (SEQ ID NO:2719), CLDLVTC (SEQ ID NO:2720), CLDLVTGC (SEQ ID NO:2721), CALDLVC (SEQ ID NO:2722), CALDLVTC (SEQ ID NO:2723), CALDLVTGC (SEQ ID NO:2724), CFALDLVC (SEQ ID NO:2725), CFALDLVTC (SEQ ID NO:2726), CFALDLVTGC (SEQ ID NO:2727), CLFALDLVC (SEQ ID NO:2728), CLFALDLVTC (SEQ ID NO:2729), CLFALDLVTGC (SEQ ID NO:2730), CNRDC (SEQ ID NO:2731), CNRDNC (SEQ ID NO:2732), CNRDNGC (SEQ ID NO:2733), CINRDC (SEQ ID NO:2734), CINRDNC (SEQ ID NO:2735), CINRDNGC (SEQ ID NO:2736), CTINRDC (SEQ ID NO:2737), CTINRDNC (SEQ ID NO:2738), CTINRDNGC (SEQ ID NO:2739), CFTINRDC (SEQ ID NO:2740), CFTINRDNC (SEQ ID NO:2741), CFTINRDNGC (SEQ ID NO:2742), CYFTINRDC (SEQ ID NO:2743), CYFTINRDNC (SEQ ID NO:2744), CYFTINRDNGC (SEQ ID NO:2745), CDPSC (SEQ ID NO:2746), CDPSSC (SEQ ID NO:2747), CDPSSGC (SEQ ID NO:2748), CIDPSC (SEQ ID NO:2749), CIDPSSC (SEQ ID NO:2750), CIDPSSGC (SEQ ID NO:2751), CEIDPSC (SEQ ID NO:2752), CEIDPSSC (SEQ ID NO:2753), CEIDPSSGC (SEQ ID NO:2754), CFEIDPSC (SEQ ID NO:2755), CFEIDPSSC (SEQ ID NO:2756), CEIDPSSGC (SEQ ID NO:2757), CFEIDPSC (SEQ ID NO:2758), CFEIDPSSC (SEQ ID NO:2759), CFEIDPSSGC (SEQ ID NO:2760), CLFEIDPSC (SEQ ID NO:2761), CLFEIDPSSC (SEQ ID NO:2762), CLFEIDPSSGC (SEQ ID NO:2763), EDLVK (SEQ ID NO:2764), EDLVTK (SEQ ID NO:2765), EDLVTGK (SEQ ID NO:2766), ELDLVK (SEQ ID NO:2767), ELDLVTK (SEQ ID NO:2768), ELDLVTGK (SEQ ID NO:2769), EALDLVK (SEQ ID NO:2770), EALDLVTK (SEQ ID NO:2771), EALDLVTGK (SEQ ID NO:2772), EFALDLVK (SEQ ID NO:2773), EFALDLVTK (SEQ ID NO:2774), EFALDLVTGK (SEQ ID NO:2775), ELFALDLVK (SEQ ID NO:2776), ELFALDLVTK (SEQ ID NO:2777), ELFALDLVTGK (SEQ ID NO:2778), ENRDK (SEQ ID NO:2779), ENRDNK (SEQ ID NO:2780), ENRDNGK (SEQ ID NO:2781), EINRDK (SEQ ID NO:2782), EINRDNK (SEQ ID NO:2783), EINRDNGK (SEQ ID NO:2784), ETINRDK (SEQ ID NO:2785), ETINRDNK (SEQ ID NO:2786), ETINRDNGK (SEQ ID NO:2787), EFTINRDK (SEQ ID NO:2788), EFTINRDNK (SEQ ID NO:2789), EFTINRDNGK (SEQ ID NO:2790), EYFTINRDK (SEQ ID NO:2791), EYFTINRDNK (SEQ ID NO:2792), EYFTINRDNGK (SEQ ID NO:2793), EDPKK (SEQ ID NO:2794), EDPKTK (SEQ ID NO:2795), EDPKTGK (SEQ ID NO:2796), EIDPKK (SEQ ID NO:2797), EIDPKTK (SEQ ID NO:2798), EIDPKTGK (SEQ ID NO:2799), ESIDPKK (SEQ ID NO:2800), ESIDPKTK (SEQ ID NO:2801), ESIDPKTGK (SEQ ID NO:2802), EFSIDPKK (SEQ ID NO:2803), EFSIDPKTK (SEQ ID NO:2804), EFSIDPKTGK (SEQ ID NO:2805), ELFSIDPKK (SEQ ID NO:2806), ELFSIDPKTK (SEQ ID NO:2807), ELFSIDPKTGK (SEQ ID NO:2808), EDPSK (SEQ ID NO:2809), EDPSSK (SEQ ID NO:2810), EDPSSGK (SEQ ID NO:2811), EIDPSK (SEQ ID NO:2812), EIDPSSK (SEQ ID NO:2813), EIDPSSGK (SEQ ID NO:2814), EEIDPSK (SEQ ID NO:2815), EEIDPSSK (SEQ ID NO:2816), EEIDPSSGK (SEQ ID NO:2817), EFEIDPSK (SEQ ID NO:2818), EFEIDPSSK (SEQ ID NO:2819), EEIDPSSGK (SEQ ID NO:2820), EFEIDPSK (SEQ ID NO:2821), EFEIDPSSK (SEQ ID NO:2822), EFEIDPSSGK (SEQ ID NO:2823), ELFEIDPSK (SEQ ID NO:2824), ELFEIDPSSK (SEQ ID NO:2825), ELFEIDPSSGK (SEQ ID NO:2826), KDLVD (SEQ ID NO:2827), KDLVTD (SEQ ID NO:2828), KDLVTGD (SEQ ID NO:2829), KLDLVD (SEQ ID NO:2830), KLDLVTD (SEQ ID NO:2831), KLDLVTGD (SEQ ID NO:2832), KALDLVD (SEQ ID NO:2833), KALDLVTD (SEQ ID NO:2834), KALDLVTGD (SEQ ID NO:2835), KFALDLVD (SEQ ID NO:2836), KFALDLVTD (SEQ ID NO:2837), KFALDLVTGD (SEQ ID NO:2838), KLFALDLVD (SEQ ID NO:2839), KLFALDLVTD (SEQ ID NO:2840), KLFALDLVTGD (SEQ ID NO:2841), KNRDD (SEQ ID NO:2842), KNRDND (SEQ ID NO:2843), KNRDNGD (SEQ ID NO:2844), KINRDD (SEQ ID NO:2845), KINRDND (SEQ ID NO:2846), KINRDNGD (SEQ ID NO:2847), KTINRDD (SEQ ID NO:2848), KTINRDND (SEQ ID NO:2849), KTINRDNGD (SEQ ID NO:2850), KFTINRDD (SEQ ID NO:2851), KFTINRDND (SEQ ID NO:2852), KFTINRDNGD (SEQ ID NO:2853), KYFTINRDD (SEQ ID NO:2854), KYFTINRDND (SEQ ID NO:2855), KYFTINRDNGD (SEQ ID NO:2856), KDPKD (SEQ ID NO:2857), KDPKTD (SEQ ID NO:2858), KDPKTGD (SEQ ID NO:2859), KIDPKD (SEQ ID NO:2860), KIDPKTD (SEQ ID NO:2861), KIDPKTGD (SEQ ID NO:2862), KSIDPKD (SEQ ID NO:2863), KSIDPKTD (SEQ ID NO:2864), KSIDPKTGD (SEQ ID NO:2865), KFSIDPKD (SEQ ID NO:2866), KFSIDPKTD (SEQ ID NO:2867), KFSIDPKTGD (SEQ ID NO:2868), KLFSIDPKD (SEQ ID NO:2869), KLFSIDPKTD (SEQ ID NO:2870), KLFSIDPKTGD (SEQ ID NO:2871), KDPSD (SEQ ID NO:2872), KDPSSD (SEQ ID NO:2873), KDPSSGD (SEQ ID NO:2874), KIDPSD (SEQ ID NO:2875), KIDPSSD (SEQ ID NO:2876), KIDPSSGD (SEQ ID NO:2877), KEIDPSD (SEQ ID NO:2878), KEIDPSSD (SEQ ID NO:2879), KEIDPSSGD (SEQ ID NO:2880), KFEIDPSD (SEQ ID NO:2881), KFEIDPSSD (SEQ ID NO:2882), KFEIDPSSGD (SEQ ID NO:2886), KLFEIDPSD (SEQ ID NO:2887), KLFEIDPSSD (SEQ ID NO:2888), KLFEIDPSSGD (SEQ ID NO:2889), KDLVE (SEQ ID NO:2890), KDLVTE (SEQ ID NO:2891), KDLVTGE (SEQ ID NO:2892), KLDLVE (SEQ ID NO:2893), KLDLVTE (SEQ ID NO:2894), KLDLVTGE (SEQ ID NO:2895), KALDLVE (SEQ ID NO:2896), KALDLVTE (SEQ ID NO:2897), KALDLVTGE (SEQ ID NO:2898), KFALDLVE (SEQ ID NO:2899), KFALDLVTE (SEQ ID NO:2900), KFALDLVTGE (SEQ ID NO:2901), KLFALDLVE (SEQ ID NO:2902), KLFALDLVTE (SEQ ID NO:2903), KLFALDLVTGE (SEQ ID NO:2904), KNRDE (SEQ ID NO:2905), KNRDNE (SEQ ID NO:2906), KNRDNGE (SEQ ID NO:2907), KINRDE (SEQ ID NO:2908), KINRDNE (SEQ ID NO:2909), KINRDNGE (SEQ ID NO:2910), KTINRDE (SEQ ID NO:2911), KTINRDNE (SEQ ID NO:2912), KTINRDNGE (SEQ ID NO:2913), KFTINRDE (SEQ ID NO:2914), KFTINRDNE (SEQ ID NO:2915), KFTINRDNGE (SEQ ID NO:2916), KYFTINRDE (SEQ ID NO:2917), KYFTINRDNE (SEQ ID NO:2918), KYFTINRDNGE (SEQ ID NO:2919), KDPKE (SEQ ID NO:2920), KDPKTE (SEQ ID NO:2921), KDPKTGE (SEQ ID NO:2922), KIDPKE (SEQ ID NO:2923), KIDPKTE (SEQ ID NO:2924), KIDPKTGE (SEQ ID NO:2925), KSIDPKE (SEQ ID NO:2926), KSIDPKTE (SEQ ID NO:2927), KSIDPKTGE (SEQ ID NO:2928), KFSIDPKE (SEQ ID NO:2929), KFSIDPKTE (SEQ ID NO:2930), KFSIDPKTGE (SEQ ID NO:2931), KLFSIDPKE (SEQ ID NO:2932), KLFSIDPKTE (SEQ ID NO:2933), KLFSIDPKTGE (SEQ ID NO:2934), KDPSE (SEQ ID NO:2935), KDPSSE (SEQ ID NO:2936), KDPSSGE (SEQ ID NO:2937), KIDPSE (SEQ ID NO:2938), KIDPSSE (SEQ ID NO:2939), KIDPSSGE (SEQ ID NO:2940), KEIDPSE (SEQ ID NO:2941), KEIDPSSE (SEQ ID NO:2942), KEIDPSSGE (SEQ ID NO:2943), KFEIDPSE (SEQ ID NO:2944), KFEIDPSSE (SEQ ID NO:2945), KFEIDPSSGE (SEQ ID NO:2949), KLFEIDPSE (SEQ ID NO:2950), KLFEIDPSSE (SEQ ID NO:2951), KLFEIDPSSGE (SEQ ID NO:2952), DDLVK (SEQ ID NO:2953), DDLVTK (SEQ ID NO:2954), DDLVTGK (SEQ ID NO:2955), DLDLVK (SEQ ID NO:2956), DLDLVTK (SEQ ID NO:2957), DLDLVTGK (SEQ ID NO:2958), DALDLVK (SEQ ID NO:2959), DALDLVTK (SEQ ID NO:2960), DALDLVTGK (SEQ ID NO:2961), DFALDLVK (SEQ ID NO:2962), DFALDLVTK (SEQ ID NO:2963), DFALDLVTGK (SEQ ID NO:2964), DLFALDLVK (SEQ ID NO:2965), DLFALDLVTK (SEQ ID NO:2966), DLFALDLVTGK (SEQ ID NO:2967), DNRDK (SEQ ID NO:2968), DNRDNK (SEQ ID NO:2969), DNRDNGK (SEQ ID NO:2970), DINRDK (SEQ ID NO:2971), DINRDNK (SEQ ID NO:2972), DINRDNGK (SEQ ID NO:2973), DTINRDK (SEQ ID NO:2974), DTINRDNK (SEQ ID NO:2975), DTINRDNGK (SEQ ID NO:2976), DFTNRDK (SEQ ID NO:2977), DFTINRDNK (SEQ ID NO:2978), DFTINRDNGK (SEQ ID NO:2979), DYFTINRDK (SEQ ID NO:2980), DYFTINRDNK (SEQ ID NO:2981), DYFTINRDNGK (SEQ ID NO:2982), DDPKK (SEQ ID NO:2983), DDPKTK (SEQ ID NO:2984), DDPKTGK (SEQ ID NO:2985), DIDPKK (SEQ ID NO:2986), DIDPKTK (SEQ ID NO:2987), DIDPKTGD (SEQ ID NO:2988), DSIDPKK (SEQ ID NO:2989), DSIDPKTK (SEQ ID NO:2990), DSIDPKTGK (SEQ ID NO:2991), DFSIDPKK (SEQ ID NO:2992), DFSIDPKTK (SEQ ID NO:2993), DFSIDPKTGK (SEQ ID NO:2994), DLFSIDPKK (SEQ ID NO:2995), DLFSIDPKTK (SEQ ID NO:2996), DLFSIDPKTGK (SEQ ID NO:2997), DDPSK (SEQ ID NO:2998), DDPSSK (SEQ ID NO:2999), DDPSSGK (SEQ ID NO:3000), DIDPSK (SEQ ID NO:3001), DIDPSSK (SEQ ID NO:3002), DIDPSSGK (SEQ ID NO:3003), DEIDPSK (SEQ ID NO:3004), DEIDPSSK (SEQ ID NO:3005), DEIDPSSGK (SEQ ID NO:3006), DFEIDPSK (SEQ ID NO:3007), DFEIDPSSK (SEQ ID NO:3008), DFEIDPSSGK (SEQ ID NO:3012), DLFEIDPSK (SEQ ID NO:3013), DLFEIDPSSK (SEQ ID NO:3014), DLFEIDPSSGK (SEQ ID NO:3015), DLVTG (SEQ ID NO:3016), LDLVT (SEQ ID NO:3017), LDLVTG (SEQ ID NO:3018), ALDLV (SEQ ID NO:3019), ALDLVT (SEQ ID NO:3020), ALDLVTG (SEQ ID NO:3021), FALDLV (SEQ ID NO:3022), FALDLVTC (SEQ ID NO:3023), FALDLVTG (SEQ ID NO:3024), LFALDLV (SEQ ID NO:3025), LFALDLVT (SEQ ID NO:3026), LFALDLVTG (SEQ ID NO:3027), NRDNG (SEQ ID NO:3028), INRDN (SEQ ID NO:3029), INRDNG (SEQ ID NO:3030), TINRD (SEQ ID NO:3031), TINRDN (SEQ ID NO:3032), TINRDNG (SEQ ID NO:3033), FTINRD (SEQ ID NO:3034), FTINRDN (SEQ ID NO:3035), FTINRDNG (SEQ ID NO:3036), YFTINRD (SEQ ID NO:3037), YFTINRDN (SEQ ID NO:3038), YFTINRDNG (SEQ ID NO:3039), DPKTG (SEQ ID NO:3040), IDPKT (SEQ ID NO:3041), IDPKTG (SEQ ID NO:3042), SIDPK (SEQ ID NO:3043), SIDPKT (SEQ ID NO:3044), SIDPKTG (SEQ ID NO:3045), FSIDPK (SEQ ID NO:3046), FSIDPKT (SEQ ID NO:3047), FSIDPKTG (SEQ ID NO:3048), LFSIDPK (SEQ ID NO:3049), LFSIDPKT (SEQ ID NO:3050), LFSIDPKTG (SEQ ID NO:3051), DPSSG (SEQ ID NO:3052), IDPSS (SEQ ID NO:3053), IDPSSG (SEQ ID NO:3054), EIDPSS (SEQ ID NO:3056), EIDPSSG (SEQ ID NO:3057), FEIDPS (SEQ ID NO:3058), FEIDPSS (SEQ ID NO:3059), EIDPSSG (SEQ ID NO:3060), FEIDPS (SEQ ID NO:3061), FEIDPSSG (SEQ ID NO:3062), LFEIDPS (SEQ ID NO:3063), LFEIDPSS (SEQ ID NO:3064) and LFEIDPSSG (SEQ ID NO:3065).

[0142] Representative cyclic peptides comprising a desmoglein CAR sequence include: CNQKC (SEQ ID NO:3066), CNQKTC (SEQ ID NO:3067), CNQKTGC (SEQ ID NO:3068), CINQKC (SEQ ID NO:3069), CINQKTC (SEQ ID NO:3070), CINQKTGC (SEQ ID NO:3071), CVINQKC (SEQ ID NO:3072), CVINQKTC (SEQ ID NO:3073), CVINQKTGC (SEQ ID NO:3074), CFVINQKC (SEQ ID NO:3075), CFVINQKTC (SEQ ID NO:3076), CFVINQKTGC (SEQ ID NO:3077), CIFVINQKC (SEQ ID NO:3078), CIFVINQKTC (SEQ ID NO:3079), CIFVINQKTGC (SEQ ID NO:3080), CNRNC (SEQ ID NO:3081), CNRNTC (SEQ ID NO:3082), CNRNTGC (SEQ ID NO:3083), CINRNC (SEQ ID NO:3084), CINRNTC (SEQ ID NO:3085), CINRNTGC (SEQ ID NO:3086), CIINRNC (SEQ ID NO:3087), CIINRNTC (SEQ ID NO:3088), CIINRNTGC (SEQ ID NO:3089), CFIINRNC (SEQ ID NO:3090), CFIINRNTC (SEQ ID NO:3091), CFIINRNTGC (SEQ ID NO:3092), CMFIINRNC (SEQ ID NO:3093), CMFIINRNTC (SEQ ID NO:3094), CMFIINRNTGC (SEQ ID NO:3095), CNKDC (SEQ ID NO:3096), CNKDTC (SEQ ID NO:3097), CNKDTGC (SEQ ID NO:3098), CLNKDC (SEQ ID NO:3099), CLNKDTC (SEQ ID NO:3100), CLNKDTGC (SEQ ID NO:3101), CYLNKDC (SEQ ID NO:3102), CYLNKDTC (SEQ ID NO:3103), CYLNKDTGC (SEQ ID NO:3104), CFYLNKDC (SEQ ID NO:3105), CFYLNKDTC (SEQ ID NO:3106), CFYLNKDTGC (SEQ ID NO:3107), CVFYLNKDC (SEQ ID NO:3108), CVFYLNKDTC (SEQ ID NO:3109), CVFYLNKDTGC (SEQ ID NO:3110), ENQKK (SEQ ID NO:3111), ENQKTK (SEQ ID NO:3112), ENQKTGK (SEQ ID NO:3113), EINQKK (SEQ ID NO:3114), EINQKTK (SEQ ID NO:3115), EINQKTGK (SEQ ID NO:3116), EVINQKK (SEQ ID NO:3117), EVINQKTK (SEQ ID NO:3118), EVINQKTGK (SEQ ID NO:3119), EFVINQKK (SEQ ID NO:3120), EFVINQKTK (SEQ ID NO:3121), EFVINQKTGK (SEQ ID NO:3122), EIFVINQKK (SEQ ID NO:3123), EIFVINQKTK (SEQ ID NO:3124), EIFVINQKTGK (SEQ ID NO:3125), ENRNK (SEQ ID NO:3126), ENRNTK (SEQ ID NO:3127), ENRNTGK (SEQ ID NO:3128), EINRNK (SEQ ID NO:3129), EINRNTK (SEQ ID NO:3130), EINRNTGK (SEQ ID NO:3131), EIINRNK (SEQ ID NO:3132), EIINRNTK (SEQ ID NO:3133), EIINRNTGK (SEQ ID NO:3134), EFIINRNK (SEQ ID NO:3135), EFIINRNTK (SEQ ID NO:3136), EFIINRNTGK (SEQ ID NO:3137), EMFIINRNK (SEQ ID NO:3138), EMFIINRNTK (SEQ ID NO:3139), EMFIINRNTGK (SEQ ID NO:3140), ENKDK (SEQ ID NO:3141), ENKDTK (SEQ ID NO:3142), ENKDTGK (SEQ ID NO:3143), ELNKDK (SEQ ID NO:3144), ELNKDTK (SEQ ID NO:3145), ELNKDTGK (SEQ ID NO:3146), EYLNKDK (SEQ ID NO:3147), EYLNKDTK (SEQ ID NO:3148), EYLNKDTGK (SEQ ID NO:3149), EFYLNKDK (SEQ ID NO:3150), EFYLNKDTK (SEQ ID NO:3151), EFYLNKDTGK (SEQ ID NO:3152), EVFYLNKDK (SEQ ID NO:3153), EVFYLNKDTK (SEQ ID NO:3154), EVFYLNKDTGK (SEQ ID NO:3155), KNQKD (SEQ ID NO:3156), KNQKTD (SEQ ID NO:3157), KNQKTGD (SEQ ID NO:3158), KINQKD (SEQ ID NO:3159), KINQKTD (SEQ ID NO:3160), KINQKTGD (SEQ ID NO:3161), KVINQKD (SEQ ID NO:3162), KVINQKTD (SEQ ID NO:3163), KVINQKTGD (SEQ ID NO:3164), KFVINQKD (SEQ ID NO:3165), KFVINQKTD (SEQ ID NO:3166), KFVINQKTGD (SEQ ID NO:3167), KIFVINQKD (SEQ ID NO:3168), KIFVINQKTD (SEQ ID NO:3169), KIFVINQKTGD (SEQ ID NO:3170), KNRND (SEQ ID NO:3171), KNRNTD (SEQ ID NO:3172), KNRNTGD (SEQ ID NO:3173), KINRND (SEQ ID NO:3174), KINRNTD (SEQ ID NO:3175), KINRNTGD (SEQ ID NO:3176), KIINRND (SEQ ID NO:3177), KIINRNTD (SEQ ID NO:3178), KIINRNTGD (SEQ ID NO:3179), KFIINRND (SEQ ID NO:3180), KFIINRNTD (SEQ ID NO:3181), KFIINRNTGD (SEQ ID NO:3182), KMFIINRND (SEQ ID NO:3183), KMFIINRNTD (SEQ ID NO:3184), KMFIINRNTGD (SEQ ID NO:3185), KNKDD (SEQ ID NO:3186), KNKDTD (SEQ ID NO:3187), KNKDTGD (SEQ ID NO:3188), KLNKDD (SEQ ID NO:3189), KLNKDTD (SEQ ID NO:3190) KLNKDTGD (SEQ ID NO:3191), KYLNKDD (SEQ ID NO:3192), KYLNKDTD (SEQ ID NO:3193), KYLNKDTGD (SEQ ID NO:3194), KFYLNKDD (SEQ ID NO:3195), KFYLNKDTD (SEQ ID NO:3196), KFYLNKDTGD (SEQ ID NO:3197), KVFYLNKDD (SEQ ID NO:3198), KVFYLNKDTD (SEQ ID NO:3199), KVFYLNKDTGD (SEQ ID NO:3200), DNQKK (SEQ ID NO:3201), DNQKTK (SEQ ID NO:3202), DNQKTGK (SEQ ID NO:3203), DINQKK (SEQ ID NO:3204), DINQKTK (SEQ ID NO:3205), DINQKTGK (SEQ ID NO:3206), DVINQKK (SEQ ID NO:3207), DVINQKTK (SEQ ID NO:3208), DVINQKTGK (SEQ ID NO:3209), DFVINQKK (SEQ ID NO:3210), DFVINQKTK (SEQ ID NO:3211), DFVINQKTGK (SEQ ID NO:3212), DIFVINQKK (SEQ ID NO:3213), DIFVINQKTK (SEQ ID NO:3214), DIFVINQKTGK (SEQ ID NO:3215), DNRNK (SEQ ID NO:3216), DNRNTK (SEQ ID NO:3217), DNRNTGK (SEQ ID NO:3218), DINRNK (SEQ ID NO:3219), DINRNTK (SEQ ID NO:3220), DINRNTGK (SEQ ID NO:3221), DIINRNK (SEQ ID NO:3222), DIINRNTK (SEQ ID NO:3223), DIINRNTGK (SEQ ID NO:3224), DFIINRNK (SEQ ID NO:3225), DFIINRNTK (SEQ ID NO:3226), DFIINRNTGK (SEQ ID NO:3227), DMFIINRNK (SEQ ID NO:3228), DMFIINRNTK (SEQ ID NO:3229), DMFIINRNTGK (SEQ ID NO:3230), DNKDK (SEQ ID NO:3231), DNKDTK (SEQ ID NO:3232), DNKDTGK (SEQ ID NO:3233), DLNKDK (SEQ ID NO:3234), DLNKDTK (SEQ ID NO:3235), DLNKDTGK (SEQ ID NO:3236), DYLNKDK (SEQ ID NO:3237), DYLNKDTK (SEQ ID NO:3238), DYLNKDTGK (SEQ ID NO:3239), DFYLNKDK (SEQ ID NO:3240), DFYLNKDTK (SEQ ID NO:3241), DFYLNKDTGK (SEQ ID NO:3242), DVFYLNKDK (SEQ ID NO:3243), DVFYLNKDTK (SEQ ID NO:3244), DVFYLNKDTGK (SEQ ID NO:3245), KKNQKE (SEQ ID NO:3246), KNQKTE (SEQ ID NO:3247), KNQKTGE (SEQ ID NO:3248), KINQKE (SEQ ID NO:3249), KINQKTE (SEQ ID NO:3250), KINQKTGE (SEQ ID NO:3251), KVINQKE (SEQ ID NO:3252), KVINQKTE (SEQ ID NO:3253), KVINQKTGE (SEQ ID NO:3254), KFVINQKE (SEQ ID NO:3255), KFVINQKTE (SEQ ID NO:3256), KFVINQKTGE (SEQ ID NO:3257), KIFVINQKE (SEQ ID NO:3258), KIFVINQKTE (SEQ ID NO:3259), KIFVINQKTGE (SEQ ID NO:3260), KNRNE (SEQ ID NO:3261), KNRNTE (SEQ ID NO:3262), KNRNTGE (SEQ ID NO:3263), KINRNE (SEQ ID NO:3264), KINRNTE (SEQ ID NO:3265), KINRNTGE (SEQ ID NO:3266), KIINRNE (SEQ ID NO:3267), KIINRNTE (SEQ ID NO:3268), KIINRNTGE (SEQ ID NO:3269), KFIINRNE (SEQ ID NO:3270), KFIINRNTE (SEQ ID NO:3271), KFIINRNTGE (SEQ ID NO:3272), KMFIINRNE (SEQ ID NO:3273), KMFIINRNTE (SEQ ID NO:3274), KMFIINRNTGE (SEQ ID NO:3275), KNKDE (SEQ ID NO:3276), KNKDTE (SEQ ID NO:3277), KNKDTGE (SEQ ID NO:3278), KLNKDE (SEQ ID NO:3279), KLNKDTE (SEQ ID NO:3280), KLNKDTGE (SEQ ID NO:3281), KYLNKDE (SEQ ID NO:3282), KYLNKDTE (SEQ ID NO:3283), KYLNKDTGE (SEQ ID NO:3284), KFYLNKDE (SEQ ID NO:3285), KFYLNKDTE (SEQ ID NO:3286), KFYLNKDTGE (SEQ ID NO:3287), KVFYLNKDE (SEQ ID NO:3288), KVFYLNKDTE (SEQ ID NO:3289), KVFYLNKDTGE (SEQ ID NO:3290), NQKTG (SEQ ID NO:3291), INQKT (SEQ ID NO:3292), INQKTG (SEQ ID NO:3293), VINQK (SEQ ID NO:3294), VINQKT (SEQ ID NO:3295), VINQKTG (SEQ ID NO:3296), FVINQK (SEQ ID NO:3297), FVINQKT (SEQ ID NO:3298), FVINQKTG (SEQ ID NO:3299), IFVINQK (SEQ ID NO:3300), IFVINQKT (SEQ ID NO:3301), IFVINQKTG (SEQ ID NO:3302), NRNTG (SEQ ID NO:3303), INRNT (SEQ ID NO:3304), INRNTG (SEQ ID NO:3305), IINRN (SEQ ID NO:3306), IINRNT (SEQ ID NO:3307), IINRNTG (SEQ ID NO:3308), FIINRN (SEQ ID NO:3309), FIINRNT (SEQ ID NO:3310), FIINRNTG (SEQ ID NO:3311), MFIINRN (SEQ ID NO:3312), MFIINRNT (SEQ ID NO:3313), MFIINRNTG (SEQ ID NO:3314), NKDTG (SEQ ID NO:3315), LNKDT (SEQ ID NO:3316), LNKDTG (SEQ ID NO:3317), YLNKD (SEQ ID NO:3318), YLNKDT (SEQ ID NO:3319), YLNKDTG (SEQ ID NO:3320), FYLNKD (SEQ ID NO:3321), FYLNKDT (SEQ ID NO:3322), FYLNKDTG (SEQ ID NO:3323), VFYLNKD (SEQ ID NO:3324), VFYLNKDT (SEQ ID NO:3325) and VFYLNKDTG (SEQ ID NO:3326).

[0143] Representative cyclic peptides comprising a desmocollin CAR sequence include: CEKDC (SEQ ID NO:3327), CEKDTC (SEQ ID NO:3328), CEKDTGC (SEQ ID NO:3329), CIEKDC (SEQ ID NO:3330), CIEKDTC (SEQ ID NO:3331), CIEKDTGC (SEQ ID NO:3332), CYIEKDC (SEQ ID NO:3333), CYIEKDTC (SEQ ID NO:3334), CYIEKDTGC (SEQ ID NO:3335), CFYIEKDC (SEQ ID NO:3336), CFYIEKDTC (SEQ ID NO:3337), CFYIEKDTGC (SEQ ID NO:3338), CLFYIEKDC (SEQ ID NO:3339), CLFYIEKDTC (SEQ ID NO:3340), CLFYIEKDTGC (SEQ ID NO:3341), CERDC (SEQ ID NO:3342), CERDTC (SEQ ID NO:3343), CERDTGC (SEQ ID NO:3344), CVERDC (SEQ ID NO:3345), CVERDTC (SEQ ID NO:3346), CVERDTGC (SEQ ID NO:3347), CYVERDC (SEQ ID NO:3348), CYVERDTC (SEQ ID NO:3349), CYVERDTGC (SEQ ID NO:3350), CFYVERDC (SEQ ID NO:3351), CFYVERDTC (SEQ ID NO:3352), CFYVERDTGC (SEQ ID NO:3353), CLFYVERDC (SEQ ID NO:3354), CLFYVERDTC (SEQ ID NO:3355), CLFYVERDTGC (SEQ ID NO:3356), CIERDC (SEQ ID NO:3357), CIERDTC (SEQ ID NO:3358), CIERDTGC (SEQ ID NO:3359), CYIERDC (SEQ ID NO:3360), CYIERDTC (SEQ ID NO:3361), CYIERDTGC (SEQ ID NO:3362), CFYIERDC (SEQ ID NO:3363), CFYIERDTC (SEQ ID NO:3364), CFYIERDTGC (SEQ ID NO:3365), CLFYIERDC (SEQ ID NO:3366), CLFYIERDTC (SEQ ID NO:3367), CLFYIERDTGC (SEQ ID NO:3368), EEKDK (SEQ ID NO:3369), EEKDTK (SEQ ID NO:3370), EEKDTGK (SEQ ID NO:3371), EIEKDK (SEQ ID NO:3372), EIEKDTK (SEQ ID NO:3373), EIEKDTGK (SEQ ID NO:3374), EYIEKDK (SEQ ID NO:3375), EYIEKDTK (SEQ ID NO:3376), EYIEKDTGK (SEQ ID NO:3377), EFYIEKDK (SEQ ID NO:3378), EFYIEKDTK (SEQ ID NO:3379), EFYIEKDTGK (SEQ ID NO:3380), ELFYIEKDK (SEQ ID NO:3381), ELFYIEKDTK (SEQ ID NO:3382), ELFYIEKDTGK (SEQ ID NO:3383), EERDK (SEQ ID NO:3384), EERDTK (SEQ ID NO:3385), EERDTGK (SEQ ID NO:3386), EVERDK (SEQ ID NO:3387), EVERDTK (SEQ ID NO:3388), EVERDTGK (SEQ ID NO:3389), EYVERDK (SEQ ID NO:3390), YVERDTK (SEQ ID NO:3391), EYVERDTGK (SEQ ID NO:3392), EFYVERDK (SEQ ID NO:3393), EFYVERDTK (SEQ ID NO:3394), EFYVERDTGK (SEQ ID NO:3395), ELFYVERDK (SEQ ID NO:3396), ELFYVERDTK (SEQ ID NO:3397), ELFYVERDTGK (SEQ ID NO:3398), EIERDK (SEQ ID NO:3399), EIERDTK (SEQ ID NO:3400), EIERDTGK (SEQ ID NO:3401), EYIERDK (SEQ ID NO:3402), EYIERDTK (SEQ ID NO:3403), EYIERDTGK (SEQ ID NO:3404), EFYIERDK (SEQ ID NO:3405), EFYIERDTK (SEQ ID NO:3406), EFYIERDTGK (SEQ ID NO:3407), ELFYIERDK (SEQ ID NO:3408), ELFYIERDTK (SEQ ID NO:3409), ELFYIERDTGK (SEQ ID NO:3410), KEKDD (SEQ ID NO:3411), KEKDTD (SEQ ID NO:3412), KEKDTGD (SEQ ID NO:3413), KIEKDD (SEQ ID NO:3414), KIEKDTD (SEQ ID NO:3415), KIEKDTGD (SEQ ID NO:3416), KYIEKDD (SEQ ID NO:3417), KYIEKDTD (SEQ ID NO:3418), KYIEKDTGD (SEQ ID NO:3419), KFYIEKDD (SEQ ID NO:3420), KFYIEKDTD (SEQ ID NO:3421), KFYIEKDTGD (SEQ ID NO:3422), KLFYIEKDD (SEQ ID NO:3423), KLFYIEKDTD (SEQ ID NO:3424), KLFYIEKDTGD (SEQ ID NO:3425), KERDD (SEQ ID NO:3426), KERDTD (SEQ ID NO:3427), KERDTGD (SEQ ID NO:3428), KVERDD (SEQ ID NO:3429), KVERDTD (SEQ ID NO:3430), KVERDTGD (SEQ ID NO:3431), KYVERDD (SEQ ID NO:3432), KYVERDTD (SEQ ID NO:3433), KYVERDTGD (SEQ ID NO:3434), KFYVERDD (SEQ ID NO:3435), KFYVERDTD (SEQ ID NO:3436), KFYVERDTGD (SEQ ID NO:3437), KLFYVERDD (SEQ ID NO:3438), KLFYVERDTD (SEQ ID NO:3439), KLFYVERDTGD (SEQ ID NO:3440), KIERDD (SEQ ID NO:3441), KIERDTD (SEQ ID NO:3442), KIERDTGD (SEQ ID NO:3443), KYIERD (SEQ ID NO:3444), KYIERDTD (SEQ ID NO:3445), KYIERDTGD (SEQ ID NO:3446), KFYIERDD (SEQ ID NO:3447), KFYIERDTD (SEQ ID NO:3448), KFYIERDTGD (SEQ ID NO:3449), KLFYIERDD (SEQ ID NO:3450), KLFYIERDTD (SEQ ID NO:3451), KLFYIERDTGD (SEQ ID NO:3452), DEKDK (SEQ ID NO:3453), DEKDTK (SEQ ID NO:3454), DEKDTGK (SEQ ID NO:3455), DIEKDK (SEQ ID NO:3456), DIEKDTK (SEQ ID NO:3457), DIEKDTGK (SEQ ID NO:3458), DYIEKDK (SEQ ID NO:3459), DYIEKDTK (SEQ ID NO:3460), DYIEKDTGK (SEQ ID NO:3461), DFYIEKDK (SEQ ID NO:3462), DFYIEKDTK (SEQ ID NO:3463), DFYIEKDTGK (SEQ ID NO:3464), DLFYIEKDK (SEQ ID NO:3465), DLFYIEKDTK (SEQ ID NO:3466), DLFYIEKDTGK (SEQ ID NO:3467), DERDK (SEQ ID NO:3468), DERDTK (SEQ ID NO:3469), DERDTGK (SEQ ID NO:3470), DVERDK (SEQ ID NO:3471), DVERDTK (SEQ ID NO:3472), DVERDTGK (SEQ ID NO:3473), DYVERDK (SEQ ID NO:3474), DYVERDTK (SEQ ID NO:3475), DYVERDTGK (SEQ ID NO:3476), DFYVERDK (SEQ ID NO:3477), DFYVERDTK (SEQ ID NO:3478), DFYVERDTGK (SEQ ID NO:3479), DLFYVERDK (SEQ ID NO:3480), DLFYVERDTK (SEQ ID NO:3481), DLFYVERDTGK (SEQ ID NO:3482), DIERDK (SEQ ID NO:3483), DIERDTK (SEQ ID NO:3484), DIERDTGK (SEQ ID NO:3485), DYIERDK (SEQ ID NO:3486), DYIERDTK (SEQ ID NO:3487), DYIERDTGK (SEQ ID NO:3488), DFYIERDK (SEQ ID NO:3489), DFYIERDTK (SEQ ID NO:3490), DFYIERDTGK (SEQ ID NO:3491), DLFYIERDK (SEQ ID NO:3492), DLFYIERDTK (SEQ ID NO:3493), DLFYIERDTGK (SEQ ID NO:3494), KEKDE (SEQ ID NO:3495), KEKDTE (SEQ ID NO:3496), KEKDTGE (SEQ ID NO:3497), KIEKDE (SEQ ID NO:3498), KIEKDTE (SEQ ID NO:3499), KIEKDTGE (SEQ ID NO:3500), KYIEKDE (SEQ ID NO:3501), KYIEKDTE (SEQ ID NO:3502), KYIEKDTGE (SEQ ID NO:3503), KFYIEKDE (SEQ ID NO:3504), KFYIEKDTE (SEQ ID NO:3505), KFYIEKDTGE (SEQ ID NO:3506), KLFYIEKDE (SEQ ID NO:3507), KLFYIEKDTE (SEQ ID NO:3508), KLFYIEKDTGE (SEQ ID NO:3509), KERDE (SEQ ID NO:3510), KERDTE (SEQ ID NO:3511), KERDTGE (SEQ ID NO:3512), KVERDE (SEQ ID NO:3513), KVERDTE (SEQ ID NO:3514), KVERDTGE (SEQ ID NO:3515), KYVERDE (SEQ ID NO:3516), KYVERDTE (SEQ ID NO:3517), KYVERDTGE (SEQ ID NO:3518), KFYVERDE (SEQ ID NO:3519), KFYVERDTE (SEQ ID NO:3520), KFYVERDTGE (SEQ ID NO:3521), KLFYVERDE (SEQ ID NO:3522), KLFYVERDTE (SEQ ID NO:3523), KLFYVERDTGE (SEQ ID NO:3524), KIERDE (SEQ ID NO:3525), KIERDTE (SEQ ID NO:3526), KIERDTGE (SEQ ID NO:3527), KYIERDE (SEQ ID NO:3528), KYIERDTE (SEQ ID NO:3529), KYIERDTGE (SEQ ID NO:3530), KFYIERDE (SEQ ID NO:3531), KFYIERDTE (SEQ ID NO:3532), KFYIERDTGE (SEQ ID NO:3533), KLFYIERDE (SEQ ID NO:3534), KLFYIERDTE (SEQ ID NO:3535), KLFYIERDTGE (SEQ ID NO:3536), EKDTG (SEQ ID NO:3537), IEKDT (SEQ ID NO:3538), IEKDTG (SEQ ID NO:3539), YIEKD (SEQ ID NO:3540), YIEKDT (SEQ ID NO:3541), YIEKDTG (SEQ ID NO:3542), FYIEKD (SEQ ID NO:3543), FYIEKDT (SEQ ID NO:3544), FYIEKDTG (SEQ ID NO:3545), LFYIEKD (SEQ ID NO:3546), LFYIEKDT (SEQ ID NO:3547), LFYIEKDTG (SEQ ID NO:3548), ERDTG (SEQ ID NO:3549), VERDT (SEQ ID NO:3550), VERDTG (SEQ ID NO:3551), YVERD (SEQ ID NO:3552), YVERDT (SEQ ID NO:3553), YVERDTG (SEQ ID NO:3554), FYVERD (SEQ ID NO:3555), FYVERDT (SEQ ID NO:3556), FYVERDTG (SEQ ID NO:3557), LFYVERD (SEQ ID NO:3558), LFYVERDT (SEQ ID NO:3559), LFYVERDTG (SEQ ID NO:3560), IERDT (SEQ ID NO:3561), IERDTG (SEQ ID NO:3562), YIERD (SEQ ID NO:3563), YIERDT (SEQ ID NO:3564), YIERDTG (SEQ ID NO:3565), FYIERD (SEQ ID NO:3566), FYIERDT (SEQ ID NO:3567), FYIERDTG (SEQ ID NO:3568), LFYIERD (SEQ ID NO:3569), LFYIERDT (SEQ ID NO:3570) and LFYIERDTG (SEQ ID NO:3571).

[0144] Representative cyclic peptides comprising a desmoglein-1 CAR sequence include: CRALC (SEQ ID NO: 4236), CRALNC (SEQ ID NO: 4237), CRALNSC (SEQ ID NO: 4238), CRALNSMC (SEQ ID NO: 4239), CRALNSLC (SEQ ID NO: 4240), CRALNSMGC (SEQ ID NO: 4241), CRALNSLGC (SEQ ID NO: 4242), CCRALC (SEQ ID NO: 4243), CCRALNC (SEQ ID NO: 4244), CCRALNSC (SEQ ID NO: 4245), CCRALNSMC (SEQ ID NO: 4246), CCRALNSLC (SEQ ID NO: 4247), CCRALNSMGC (SEQ ID NO: 4248), CCRALNSLGC (SEQ ID NO: 4249), CYCRALC (SEQ ID NO: 4250), CYCRALNC (SEQ ID NO: 4251), CYCRALNSC (SEQ ID NO: 4252), CYCRALNSMC (SEQ ID NO: 4253), CYCRALNSLC (SEQ ID NO: 4254), CYCRALNSMGC (SEQ ID NO: 4255), CYCRALNSLGC (SEQ ID NO: 4256), CIYRALC (SEQ ID NO: 4257), CIYRALNC (SEQ ID NO: 4258), CIYRALNSC (SEQ ID NO: 4259), CIYRALNSMC (SEQ ID NO: 4260), CIYRALNSLC (SEQ ID NO: 4261), CIYRALNSMGC (SEQ ID NO: 4262), CIYRALNSLGC (SEQ ID NO: 4263), ERALK (SEQ ID NO: 4264), ERALNK (SEQ ID NO: 4265), ERALNSK (SEQ ID NO: 4266), ERALNSMK (SEQ ID NO: 4267), ERALNSLK (SEQ ID NO: 4268), ERALNSMGK (SEQ ID NO: 4269), ERALNSLGK (SEQ ID NO: 4270), ECRALK (SEQ ID NO: 4271), ECRALNK (SEQ ID NO: 4272), ECRALNSK (SEQ ID NO: 4273), ECRALNSMK (SEQ ID NO: 4274), ECRALNSLK (SEQ ID NO: 4275), ECRALNSMGK (SEQ ID NO: 4276), ECRALNSLGK (SEQ ID NO: 4277), EYCRALK (SEQ ID NO: 4278), EYCRALNK (SEQ ID NO: 4279), EYCRALNSK (SEQ ID NO: 4280), EYCRALNSMK (SEQ ID NO: 4281), EYCRALNSLK (SEQ ID NO: 4282), EYCRALNSMGK (SEQ ID NO: 4283), EYCRALNSLGK (SEQ ID NO: 4284), EIYRALK (SEQ ID NO: 4285), EIYRALNK (SEQ ID NO: 4286), EIYRALNSK (SEQ ID NO: 4287), EIYRALNSMK (SEQ ID NO: 4288), EIYRALNSLK (SEQ ID NO: 4289), EIYRALNSMGK (SEQ ID NO: 4290), EIYRALNSLGK (SEQ ID NO: 4291), KRALE (SEQ ID NO: 4292), KRALNE (SEQ ID NO: 4293), KRALNSE (SEQ ID NO: 4294), KRALNSME (SEQ ID NO: 4295), KRALNSLE (SEQ ID NO: 4296), KRALNSMGE (SEQ ID NO: 4297), KRALNSLGE (SEQ ID NO: 4298), KCRALE (SEQ ID NO: 4299)ⱼ KCRALNE (SEQ ID NO: 4300), KCRALNSE (SEQ ID NO: 4301), KCRALNSME (SEQ ID NO: 4302), KCRALNSLE (SEQ ID NO: 4303), KCRALNSMGE (SEQ ID NO: 4304), KCRALNSLGE (SEQ ID NO: 4305), KYCRALE (SEQ ID NO: 4306), KYCRALNE (SEQ ID NO: 4307), KYCRALNSE (SEQ ID NO: 4308), KYCRALNSME (SEQ ID NO: 4309), KYCRALNSLE (SEQ ID NO: 4310), KYCRALNSMGE (SEQ ID NO: 4311), KYCRALNSLGE (SEQ ID NO: 4312), KIYRALE (SEQ ID NO: 4313), KIYRALNE (SEQ ID NO: 4314), KIYRALNSE (SEQ ID NO: 4315), KIYRALNSME (SEQ ID NO: 4316), KIYRALNSLE (SEQ ID NO: 4317), KIYRALNSMGE (SEQ ID NO: 4318), KIYRALNSLGE (SEQ ID NO: 4319), DRALK (SEQ ID NO: 4320), DRALNK (SEQ ID NO: 4321), DRALNSK (SEQ ID NO: 4322), DRALNSMK (SEQ ID NO: 4323), DRALNSLK (SEQ ID NO: 4324), DRALNSMGK (SEQ ID NO: 4325), DRALNSLGK (SEQ ID NO: 4326), DCRALK (SEQ ID NO: 4327), DCRALNK (SEQ ID NO: 4328), DCRALNSK (SEQ ID NO: 4329), DCRALNSMK (SEQ ID NO: 4330), DCRALNSLK (SEQ ID NO: 4331), DCRALNSMGK (SEQ ID NO: 4332), DCRALNSLGK (SEQ ID NO: 4333), DYCRALK (SEQ ID NO: 4334), DYCRALNK (SEQ ID NO: 4335), DYCRALNSK (SEQ ID NO: 4336), DYCRALNSMK (SEQ ID NO: 4337), DYCRALNSLK (SEQ ID NO: 4338), DYCRALNSMGK (SEQ ID NO: 4339), DYCRALNSLGK (SEQ ID NO: 4340), DIYRALK (SEQ ID NO: 4341), DIYRALNK (SEQ ID NO: 4342), DIYRALNSK (SEQ ID NO: 4343), DIYRALNSMK (SEQ ID NO: 4344), DIYRALNSLK (SEQ ID NO: 4345), DIYRALNSMGK (SEQ ID NO: 4346), DIYRALNSLGK (SEQ ID NO: 4347), KRALD (SEQ ID NO: 4348), KRALND (SEQ ID NO: 4349), KRALNSD (SEQ ID NO: 4350), KRALNSMD (SEQ ID NO: 4351), KRALNSLD (SEQ ID NO: 4352), KRALNSMGD (SEQ ID NO: 4353), KRALNSLGD (SEQ ID NO: 4354), KCRALD (SEQ ID NO: 4355), KCRALND (SEQ ID NO: 4356), KCRALNSD (SEQ ID NO: 4357), KCRALNSMD (SEQ ID NO: 4358), KCRALNSLD (SEQ ID NO: 4359), KCRALNSMGD (SEQ ID NO: 4360), KCRALNSLGD (SEQ ID NO: 4361), KYCRALD (SEQ ID NO: 4362), KYCRALND (SEQ ID NO: 4363), KYCRALNSD (SEQ ID NO: 4364), KYCRALNSMD (SEQ ID NO: 4365), KYCRALNSLD (SEQ ID NO: 4366), KYCRALNSMGD (SEQ ID NO: 4367), KYCRALNSLGD (SEQ ID NO: 4368), KIYRALD (SEQ ID NO: 4369), KIYRALND (SEQ ID NO: 4370), KIYRALNSD (SEQ ID NO: 4371), KIYRALNSMD (SEQ ID NO: 4372), KIYRALNSLD (SEQ ID NO: 4373), KIYRALNSMGD (SEQ ID NO: 4374), KIYRALNSLGD (SEQ ID NO: 4375), RALNS (SEQ ID NO: 4376), RALNSM (SEQ ID NO: 4377), RALNSL (SEQ ID NO: 4378), RALNSMG (SEQ ID NO: 4379), RALNSLG (SEQ ID NO: 4380), CRALN (SEQ ID NO: 4381), CRALNS (SEQ ID NO: 4382), CRALNSM (SEQ ID NO: 4383), CRALNSL (SEQ ID NO: 4384), CRALNSMG (SEQ ID NO: 4385), CRALNSLG (SEQ ID NO: 4386), YCRAL (SEQ ID NO: 4387), YCRALN (SEQ ID NO: 4388), YCRALNS (SEQ ID NO: 4389), YCRALNSM (SEQ ID NO: 4390), YCRALNSL (SEQ ID NO: 4391), YCRALNSMG (SEQ ID NO: 4392), YCRALNSLG (SEQ ID NO: 4393), IYRAL (SEQ ID NO: 4394), IYRALN (SEQ ID NO: 4395), IYRALNS (SEQ ID NO: 4396), IYRALNSM (SEQ ID NO: 4397), IYRALNSL (SEQ ID NO: 4398), IYRALNSMG (SEQ ID NO: 4399) and IYRALNSLG (SEQ ID NO: 4400).

[0145] Representative cyclic peptides comprising a desmoglein-2 CAR sequence include: CYALC (SEQ ID NO: 4401), CYALDC (SEQ ID NO: 4402), CYALDAC (SEQ ID NO: 4403), CYALDARC (SEQ ID NO: 4404), CYALDARGC (SEQ ID NO: 4405), CGYALC (SEQ ID NO: 4406), CGYALDC (SEQ ID NO: 4407), CGYALDAC (SEQ ID NO: 4408), CGYALDARC (SEQ ID NO: 4409), CGYALDARGC (SEQ ID NO: 4410), CTGYALC (SEQ ID NO: 4411), CTGYALDC (SEQ ID NO: 4412), CTGYALDAC (SEQ ID NO: 4413), CTGYALDARC (SEQ ID NO: 4414), CTGYALDARGC (SEQ ID NO: 4415), CLTGYALC (SEQ ID NO: 4416), CLTGYALDC (SEQ ID NO: 4417), CLTGYALDAC (SEQ ID NO: 4418), CLTGYALDARC (SEQ ID NO: 4419), CLTGYALDARGC (SEQ ID NO: 4420), EYALK (SEQ ID NO: 4421), EYALDK (SEQ ID NO: 4422), EYALDAK (SEQ ID NO: 4423), EYALDARK (SEQ ID NO: 4424), EYALDARGK (SEQ ID NO: 4425), EGYALK (SEQ ID NO: 4426), EGYALDK (SEQ ID NO: 4427), EGYALDAK (SEQ ID NO: 4428), EGYALDARK (SEQ ID NO: 4429), EGYALDARGK (SEQ ID NO: 4430), ETGYALK (SEQ ID NO: 4431), ETGYALDK (SEQ ID NO: 4432), ETGYALDAK (SEQ ID NO: 4433), ETGYALDARK (SEQ ID NO: 4434), ETGYALDARGK (SEQ ID NO: 4435), ELTGYALK (SEQ ID NO: 4436), ELTGYALDK (SEQ ID NO: 4437), ELTGYALDAK (SEQ ID NO: 4438), ELTGYALDARK (SEQ ID NO: 4439), ELTGYALDARGK (SEQ ID NO: 4440), KYALE (SEQ ID NO: 4441), KYALDE (SEQ ID NO: 4442), KYALDAE (SEQ ID NO: 4443), KYALDARE (SEQ ID NO: 4444), KYALDARGE (SEQ ID NO: 4445), KGYALE (SEQ ID NO: 4446), KGYALDE (SEQ ID NO: 4447), KGYALDAE (SEQ ID NO: 4448), KGYALDARE (SEQ ID NO: 4449), KGYALDARGE (SEQ ID NO: 4450), KTGYALE (SEQ ID NO: 4451), KTGYALDE (SEQ ID NO: 4452), KTGYALDAE (SEQ ID NO: 4453), KTGYALDARE (SEQ ID NO: 4454), KTGYALDARGE (SEQ ID NO: 4455), KLTGYALE (SEQ ID NO: 4456), KLTGYALDE (SEQ ID NO: 4457), KLTGYALDAE (SEQ ID NO: 4458), KLTGYALDARE (SEQ ID NO: 4459), KLTGYALDARGE (SEQ ID NO: 4460), DYALK (SEQ ID NO: 4461), DYALDK (SEQ ID NO: 4462), DYALDAK (SEQ ID NO: 4463), DYALDARK (SEQ ID NO: 4464), DYALDARGK (SEQ ID NO: 4465), DGYALK (SEQ ID NO: 4466), DGYALDK (SEQ ID NO: 4467), DGYALDAK (SEQ ID NO: 4468), DGYALDARK (SEQ ID NO: 4469), DGYALDARGK (SEQ ID NO: 4470), DTGYALK (SEQ ID NO: 4471), DTGYALDK (SEQ ID NO: 4472), DTGYALDAK (SEQ ID NO: 4473), DTGYALDARK (SEQ ID NO: 4474), DTGYALDARGK (SEQ ID NO: 4475), DLTGYALK (SEQ ID NO: 4476), DLTGYALDK (SEQ ID NO: 4474), DLTGYALDAK (SEQ ID NO: 4478), DLTGYALDARK (SEQ ID NO: 4479), DLTGYALDARGK (SEQ ID NO: 4480), KYALD (SEQ ID NO: 4481), KYALDD (SEQ ID NO: 4482), KYALDAD (SEQ ID NO: 4483), KYALDARD (SEQ ID NO: 4484), KYALDARGD (SEQ ID NO: 4485), KGYALD (SEQ ID NO: 4486), KGYALDD (SEQ ID NO: 4487), KGYALDAD (SEQ ID NO: 4488), KGYALDARD (SEQ ID NO: 4489), KGYALDARGD (SEQ ID NO: 4490), KTGYALD (SEQ ID NO: 4491), KTGYALDD (SEQ ID NO: 4492), KTGYALDAD (SEQ ID NO: 4493), KTGYALDARD (SEQ ID NO: 4494), KTGYALDARGD (SEQ ID NO: 4495), KLTGYALD (SEQ ID NO: 4496), KLTGYALDD (SEQ ID NO: 4497), KLTGYALDAD (SEQ ID NO: 4498), KLTGYALDARD (SEQ ID NO: 4499), KLTGYALDARGD (SEQ ID NO: 4500), YALDA (SEQ ID NO: 4501), YALDAR (SEQ ID NO: 4502), YALDARG (SEQ ID NO: 4503), GYALD (SEQ ID NO: 4504), GYALDA (SEQ ID NO: 4505), GYALDAR (SEQ ID NO: 4506), GYALDARG (SEQ ID NO: 4507), TGYAL (SEQ ID NO: 4508), TGYALD (SEQ ID NO: 4509), TGYALDA (SEQ ID NO: 4510), TGYALDAR (SEQ ID NO: 4511), TGYALDARG (SEQ ID NO: 4512), LTGYAL (SEQ ID NO: 4513), LTGYALD (SEQ ID NO: 4514), LTGYALDA (SEQ ID NO: 4515), LTGYALDAR (SEQ ID NO: 4516) and LTGYALDARG (SEQ ID NO: 4517).

[0146] Representative cyclic peptides comprising a desmoglein-3 CAR sequence include: CRALC (SEQ ID NO: 4518), CRALNC (SEQ ID NO: 4519), CRALNAC (SEQ ID NO: 4520), CRALNAQC (SEQ ID NO: 4521), CRALNALC (SEQ ID NO: 4522), CRALNAQGC (SEQ ID NO: 4523), CRALNALGC (SEQ ID NO: 4524), CCRALC (SEQ ID NO: 4525), CCRALNC (SEQ ID NO: 4526), CCRALNAC (SEQ ID NO: 4527), CCRALNAQC (SEQ ID NO: 4528), CCRALNALC (SEQ ID NO: 4529), CCRALNAQGC (SEQ ID NO: 4530), CCRALNALGC (SEQ ID NO: 4531), CTCRALC (SEQ ID NO: 4532), CTCRALNC (SEQ ID NO: 4533), CTCRALNAC (SEQ ID NO: 4534), CTCRALNAQC (SEQ ID NO: 4535), CTCRALNALC (SEQ ID NO: 4536), CTCRALNAQGC (SEQ ID NO: 4537), CTCRALNALGC (SEQ ID NO: 4538), CITCRALC (SEQ ID NO: 4539), CITCRALNC (SEQ ID NO: 4540), CITCRALNAC (SEQ ID NO: 4541), CITCRALNAQC (SEQ ID NO: 4542), CITCRALNALC (SEQ ID NO: 4543), CITCRALNAQGC (SEQ ID NO: 4544), CITCRALNALGC (SEQ ID NO: 4545), ERALK (SEQ ID NO: 4546), ERALNK (SEQ ID NO: 4547), ERALNAK (SEQ ID NO: 4548), ERALNAQK (SEQ ID NO: 4549), ERALNALK (SEQ ID NO: 4550), ERALNAQGK (SEQ ID NO: 4551), ERALNALGK (SEQ ID NO: 4552), ECRALK (SEQ ID NO: 4553), ECRALNK (SEQ ID NO: 4554), ECRALNAK (SEQ ID NO: 4555), ECRALNAQK (SEQ ID NO: 4556), ECRALNALK (SEQ ID NO: 4557), ECRALNAQGK (SEQ ID NO: 4558), ECRALNALGK (SEQ ID NO: 4559), ETCRALK (SEQ ID NO: 4560), ETCRALNK (SEQ ID NO: 4561), ETCRALNAK (SEQ ID NO: 4562), ETCRALNAQK (SEQ ID NO: 4563), ETCRALNALK (SEQ ID NO: 4564), ETCRALNAQGK (SEQ ID NO: 4565), ETCRALNALGK (SEQ ID NO: 4566), EITCRALK (SEQ ID NO: 4567), EITCRALNK (SEQ ID NO: 4568), EITCRALNAK (SEQ ID NO: 4569), EITCRALNAQK (SEQ ID NO: 4570), EITCRALNALK (SEQ ID NO: 4571), EITCRALNAQGK (SEQ ID NO: 4572), EITCRALNALGK (SEQ ID NO: 4573), KRALE (SEQ ID NO: 4574), KRALNE (SEQ ID NO: 4575), KRALNAE (SEQ ID NO: 4576), KRALNAQE (SEQ ID NO: 4577), KRALNALE (SEQ ID NO: 4578), KRALNAQGE (SEQ ID NO: 4579), KRALNALGE (SEQ ID NO: 4580), KCRALE (SEQ ID NO: 4581), KCRALNE (SEQ ID NO: 4582), KCRALNAE (SEQ ID NO: 4583), KCRALNAQE (SEQ ID NO: 4584), KCRALNALE (SEQ ID NO: 4585), KCRALNAQGE (SEQ ID NO: 4586), KCRALNALGE (SEQ ID NO: 4587), KTCRALE (SEQ ID NO: 4588), KTCRALNE (SEQ ID NO: 4589), KTCRALNAE (SEQ ID NO: 4590), KTCRALNAQE (SEQ ID NO: 4591), KTCRALNALE (SEQ ID NO: 4592), KTCRALNAQGE (SEQ ID NO: 4593), KTCRALNALGE (SEQ ID NO: 4594), KITCRALE (SEQ ID NO: 4595), KITCRALNE (SEQ ID NO: 4596), KITCRALNAE (SEQ ID NO: 4597), KITCRALNAQE (SEQ ID NO: 4598), KITCRALNALE (SEQ ID NO: 4599), KITCRALNAQGE (SEQ ID NO: 4600), KITCRALNALGE (SEQ ID NO: 4601), DRALK (SEQ ID NO: 4602), DRALNK (SEQ ID NO: 4603), DRALNAK (SEQ ID NO: 4604), DRALNAQK (SEQ ID NO: 4605), DRALNALK (SEQ ID NO: 4606), DRALNAQGK (SEQ ID NO: 4607), DRALNALGK (SEQ ID NO: 4608), DCRALK (SEQ ID NO: 4609), DCRALNK (SEQ ID NO: 4610), DCRALNAK (SEQ ID NO: 4611), DCRALNAQK (SEQ ID NO: 4612), DCRALNALK (SEQ ID NO: 4613), DCRALNAQGK (SEQ ID NO: 4614), DCRALNALGK (SEQ ID NO: 4615), DTCRALK (SEQ ID NO: 4616), DTCRALNK (SEQ ID NO: 4617), DTCRALNAK (SEQ ID NO: 4618), DTCRALNAQK (SEQ ID NO: 4619), DTCRALNALK (SEQ ID NO: 4620), DTCRALNAQGK (SEQ ID NO: 4621), DTCRALNALGK (SEQ ID NO: 4622), DITCRALK (SEQ ID NO: 4623), DITCRALNK (SEQ ID NO: 4624), DITCRALNAK (SEQ ID NO: 4625), DITCRALNAQK (SEQ ID NO: 4626), DITCRALNALK (SEQ ID NO: 4627), DITCRALNAQGK (SEQ ID NO: 4628), DITCRALNALGK (SEQ ID NO: 4629), KRALD (SEQ ID NO: 4630), KRALND (SEQ ID NO: 4631), KRALNAD (SEQ ID NO: 4632), KRALNAQD (SEQ ID NO: 4633), KRALNALD (SEQ ID NO: 4634), KRALNAQGD (SEQ ID NO: 4635), KRALNALGD (SEQ ID NO: 4636), KCRALD (SEQ ID NO: 4637), KCRALND (SEQ ID NO: 4638), KCRALNAD (SEQ ID NO: 4639), KCRALNAQD (SEQ ID NO: 4640), KCRALNALD (SEQ ID NO: 4641), KCRALNAQGD (SEQ ID NO: 4642), KCRALNALGD (SEQ ID NO: 4643), KTCRALD (SEQ ID NO: 4644), KTCRALND (SEQ ID NO: 4645), KTCRALNAD (SEQ ID NO: 4646), KTCRALNAQD (SEQ ID NO: 4647), KTCRALNALD (SEQ ID NO: 4648), KTCRALNAQGD (SEQ ID NO: 4649), KTCRALNALGD (SEQ ID NO: 4650), KITCRALD (SEQ ID NO: 4651), KITCRALND (SEQ ID NO: 4652), KITCRALNAD (SEQ ID NO: 4653), KITCRALNAQD (SEQ ID NO: 4654), KITCRALNALD (SEQ ID NO: 4655), KITCRALNAQGD (SEQ ID NO: 4656), KITCRALNALGD (SEQ ID NO: 4657), RALNA (SEQ ID NO: 4658), RALNAQ (SEQ ID NO: 4659), RALNAL (SEQ ID NO: 4660), RALNAQG (SEQ ID NO: 4661), RALNALG (SEQ ID NO: 4662), CRALN (SEQ ID NO: 4663), CRALNA (SEQ ID NO: 4664), CRALNAQ (SEQ ID NO: 4665), CRALNAL (SEQ ID NO: 4666), CRALNAQG (SEQ ID NO: 4667), CRALNALG (SEQ ID NO: 4668), TCRAL (SEQ ID NO: 4669), TCRALN (SEQ ID NO: 4670), TCRALNA (SEQ ID NO: 4671), TCRALNAQ (SEQ ID NO: 4672), TCRALNAL (SEQ ID NO: 4673), TCRALNAQG (SEQ ID NO: 4674), TCRALNALG (SEQ ID NO: 4675), ITCRAL (SEQ ID NO: 4676), ITCRALN (SEQ ID NO: 4677), ITCRALNA (SEQ ID NO: 4678), ITCRALNAQ (SEQ ID NO: 4679), ITCRALNAL (SEQ ID NO: 4680), ITCRALNAQG (SEQ ID NO: 4681) and ITCRALNALG (SEQ ID NO: 4682).

[0147] Representative cyclic peptides comprising a desmocollin-1 CAR sequence include: CYATC (SEQ ID NO: 4683), CYATTC (SEQ ID NO: 4684), CYATTAC (SEQ ID NO: 4685), CYATTADC (SEQ ID NO: 4686), CYATTADGC (SEQ ID NO: 4687), CGYATC (SEQ ID NO: 4688), CGYATTC (SEQ ID NO: 4689), CGYATTAC (SEQ ID NO: 4690), CGYATTADC (SEQ ID NO: 4691), CGYATTADGC (SEQ ID NO: 4692), CAYATC (SEQ ID NO: 4693), CAYATTC (SEQ ID NO: 4694), CAYATTAC (SEQ ID NO: 4695), CAYATTADC (SEQ ID NO: 4696), CAYATTADGC (SEQ ID NO: 4697), CYGYATC (SEQ ID NO: 4698), CYGYATTC (SEQ ID NO: 4699), CYGYATTAC (SEQ ID NO: 4700), CYGYATTADC (SEQ ID NO: 4701), CYGYATTADGC (SEQ ID NO: 4702), CYAYATC (SEQ ID NO: 4703), CYAYATTC (SEQ ID NO: 4704), CYAYATTAC (SEQ ID NO: 4705), CYAYATTADC (SEQ ID NO: 4706), CYAYATTADGC (SEQ ID NO: 4707), CLYGYATC (SEQ ID NO: 4708), CLYGYATTC (SEQ ID NO: 4709), CLYGYATTAC (SEQ ID NO: 4710), CLYGYATTADC (SEQ ID NO: 4711), CLYGYATTADGC (SEQ ID NO: 4712), CLYAYATC (SEQ ID NO: 4713), CLYAYATTC (SEQ ID NO: 4714), CLYAYATTAC (SEQ ID NO: 4715), CLYAYATTADC (SEQ ID NO: 4716), CLYAYATTADGC (SEQ ID NO: 4717), CVYGYATC (SEQ ID NO: 4718), CVYGYATTC (SEQ ID NO: 4719), CVYGYATTAC (SEQ ID NO: 4720), CVYGYATTADC (SEQ ID NO: 4721), CVYGYATTADGC (SEQ ID NO: 4722), CVYAYATC (SEQ ID NO: 4723), CVYAYATTC (SEQ ID NO: 4724), CVYAYATTAC (SEQ ID NO: 4725), CVYAYATTADC (SEQ ID NO: 4726), CVYAYATTADGC (SEQ ID NO: 4227), CIYGYATC (SEQ ID NO: 4728), CIYGYATTC (SEQ ID NO: 4729), CIYGYATTAC (SEQ ID NO: 4730), CIYGYATTADC (SEQ ID NO: 4731), CIYGYATTADGC (SEQ ID NO: 4732), CIYAYATC (SEQ ID NO: 4733), CIYAYATTC (SEQ ID NO: 4734), CIYAYATTAC (SEQ ID NO: 4735), CIYAYATTADC (SEQ ID NO: 4736), CIYAYATTADGC (SEQ ID NO: 4737), EYATK (SEQ ID NO: 4738), EYATTK (SEQ ID NO: 4739), EYATTAK (SEQ ID NO: 4740), EYATTADK (SEQ ID NO: 4741), EYATTADGK (SEQ ID NO: 4742), EGYATK (SEQ ID NO: 4743), EGYATTK (SEQ ID NO: 4744), EGYATTAK (SEQ ID NO: 4745), EGYATTADK (SEQ ID NO: 4746), EGYATTADGK (SEQ ID NO: 4747), EAYATK (SEQ ID NO: 4748), EAYATTK (SEQ ID NO: 4749), EAYATTAK (SEQ ID NO: 4750), EAYATTADK (SEQ ID NO: 4751), EAYATTADGK (SEQ ID NO: 4752), EYGYATK (SEQ ID NO: 4753), EYGYATTK (SEQ ID NO: 4754), EYGYATTAK (SEQ ID NO: 4755), EYGYATTADK (SEQ ID NO: 4756), EYGYATTADGK (SEQ ID NO: 4757), EYAYATK (SEQ ID NO: 4758), EYAYATTK (SEQ ID NO: 4759), EYAYATTAK (SEQ ID NO: 4760), EYAYATTADK (SEQ ID NO: 4761), EYAYATTADGK (SEQ ID NO: 4762), ELYGYATK (SEQ ID NO: 4763), ELYGYATTK (SEQ ID NO: 4764), ELYGYATTAK (SEQ ID NO: 4765), ELYGYATTADK (SEQ ID NO: 4766), ELYGYATTADGK (SEQ ID NO: 4767), ELYAYATK (SEQ ID NO: 4768), ELYAYATTK (SEQ ID NO: 4769), ELYAYATTAK (SEQ ID NO: 4770), ELYAYATTADK (SEQ ID NO: 4771), ELYAYATTADGK (SEQ ID NO: 4772), EVYGYATK (SEQ ID NO: 4773), EVYGYATTK (SEQ ID NO: 4774), EVYGYATTAK (SEQ ID NO: 4775), EVYGYATTADK (SEQ ID NO: 4776), EVYGYATTADGK (SEQ ID NO: 4777), EVYAYATK (SEQ ID NO: 4778), EVYAYATTK (SEQ ID NO: 4779), EVYAYATTAK (SEQ ID NO: 4780), EVYAYATTADK (SEQ ID NO: 4781), EVYAYATTADGK (SEQ ID NO: 4782), EIYGYATK (SEQ ID NO: 4783), EIYGYATTK (SEQ ID NO: 4784), EIYGYATTAK (SEQ ID NO: 4785), EIYGYATTADK (SEQ ID NO: 4786), EIYGYATTADGK (SEQ ID NO: 4787), EIYAYATK (SEQ ID NO: 4788), EIYAYATTK (SEQ ID NO: 4789), EIYAYATTAK (SEQ ID NO: 4790), EIYAYATTADK (SEQ ID NO: 4791), EIYAYATTADGK (SEQ ID NO: 4792), KYATE (SEQ ID NO: 4793), KYATTE (SEQ ID NO: 4794), KYATTAE (SEQ ID NO: 4795), KYATTADE (SEQ ID NO: 4796), KYATTADGE (SEQ ID NO: 4797), KGYATE (SEQ ID NO: 4798), KGYATTE (SEQ ID NO: 4799), KGYATTAE (SEQ ID NO: 4800), KGYATTADE (SEQ ID NO: 4801), KGYATTADGE (SEQ ID NO: 4802), KAYATE (SEQ ID NO: 4803), KAYATTE (SEQ ID NO: 4804), KAYATTAE (SEQ ID NO: 4805), KAYATTADE (SEQ ID NO: 4806), KAYATTADGE (SEQ ID NO: 4807), KYGYATE (SEQ ID NO: 4808), KYGYATTE (SEQ ID NO: 4809), KYGYATTAE (SEQ ID NO: 4810), KYGYATTADE (SEQ ID NO: 4811), KYGYATTADGE (SEQ ID NO: 4812), KYAYATE (SEQ ID NO: 4813), KYAYATTE (SEQ ID NO: 4814), KYAYATTAE (SEQ ID NO: 4815), KYAYATTADE (SEQ ID NO: 4816), KYAYATTADGE (SEQ ID NO: 4817), KLYGYATE (SEQ ID NO: 4818), KLYGYATTE (SEQ ID NO: 4819), KLYGYATTAE (SEQ ID NO: 4820), KLYGYATTADE (SEQ ID NO: 4821), KLYGYATTADGE (SEQ ID NO: 4822), KLYAYATE (SEQ ID NO: 4823), KLYAYATTE (SEQ ID NO: 4824), KLYAYATTAE (SEQ ID NO: 4825), KLYAYATTADE (SEQ ID NO: 4826), KLYAYATTADGE (SEQ ID NO: 4827), KVYGYATE (SEQ ID NO: 4828), KVYGYATTE (SEQ ID NO: 4829), KVYGYATTAE (SEQ ID NO: 4830), KVYGYATTADE (SEQ ID NO: 4831), KVYGYATTADGE (SEQ ID NO: 4832), KVYAYATE (SEQ ID NO: 4833), KVYAYATTE (SEQ ID NO: 4834), KVYAYATTAE (SEQ ID NO: 4835), KVYAYATTADE (SEQ ID NO: 4836), KVYAYATTADGE (SEQ ID NO: 4837), KIYGYATE (SEQ ID NO: 4838), KIYGYATTE (SEQ ID NO: 4839), KIYGYATTAE (SEQ ID NO: 4840), KIYGYATTADE (SEQ ID NO: 4841), KIYGYATTADGE (SEQ ID NO: 4842), KIYAYATE (SEQ ID NO: 4843), KIYAYATTE (SEQ ID NO: 4844), KIYAYATTAE (SEQ ID NO: 4845), KIYAYATTADE (SEQ ID NO: 4846), KIYAYATTADGE (SEQ ID NO: 4847), DYATK (SEQ ID NO: 4848), DYATTK (SEQ ID NO: 4849), DYATTAK (SEQ ID NO: 4850), DYATTADK (SEQ ID NO: 4851), DYATTADGK (SEQ ID NO: 4852), DGYATK (SEQ ID NO: 4853), DGYATTK (SEQ ID NO: 4854), DGYATTAK (SEQ ID NO: 4855), DGYATTADK (SEQ ID NO: 4856), DGYATTADGK (SEQ ID NO: 4857), DAYATK (SEQ ID NO: 4858), DAYATTK (SEQ ID NO: 4859), DAYATTAK (SEQ ID NO: 4860), DAYATTADK (SEQ ID NO: 4861), DAYATTADGK (SEQ ID NO: 4862), DYGYATK (SEQ ID NO: 4863), DYGYATTK (SEQ ID NO: 4864), DYGYATTAK (SEQ ID NO: 4865), DYGYATTADK (SEQ ID NO: 4866), DYGYATTADGK (SEQ ID NO: 4867), DYAYATK (SEQ ID NO: 4868), DYAYATTK (SEQ ID NO: 4869), DYAYATTAK (SEQ ID NO: 4870), DYAYATTADK (SEQ ID NO: 4871), DYAYATTADGK (SEQ ID NO: 4872), DLYGYATK (SEQ ID NO: 4873), DLYGYATTK (SEQ ID NO: 4874), DLYGYATTAK (SEQ ID NO: 4875), DLYGYATTADK (SEQ ID NO: 4876), DLYGYATTADGK (SEQ ID NO: 4877), DLYAYATK (SEQ ID NO: 4878), DLYAYATTK (SEQ ID NO: 4879), DLYAYATTAK (SEQ ID NO: 4880), DLYAYATTADK (SEQ ID NO: 4881), DLYAYATTADGK (SEQ ID NO: 4882), DVYGYATK (SEQ ID NO: 4883), DVYGYATTK (SEQ ID NO: 4884), DVYGYATTAK (SEQ ID NO: 4885), DVYGYATTADK (SEQ ID NO: 4886), DVYGYATTADGK (SEQ ID NO: 4887), DVYAYATK (SEQ ID NO: 4888), DVYAYATTK (SEQ ID NO: 4889), DVYAYATTAK (SEQ ID NO: 4890), DVYAYATTADK (SEQ ID NO: 4891), DVYAYATTADGK (SEQ ID NO: 4892), DIYGYATK (SEQ ID NO: 4893), DIYGYATTK (SEQ ID NO: 4894), DIYGYATTAK (SEQ ID NO: 4895), DIYGYATTADK (SEQ ID NO: 4896), DIYGYATTADGK (SEQ ID NO: 4897), DIYAYATK (SEQ ID NO: 4898), DIYAYATTK (SEQ ID NO: 4899), DIYAYATTAK (SEQ ID NO: 4900), DIYAYATTADK (SEQ ID NO: 4901), DIYAYATTADGK (SEQ ID NO: 4902), KYATD (SEQ ID NO: 4903), KYATTD (SEQ ID NO: 4904), KYATTAD (SEQ ID NO: 4905), KYATTADD (SEQ ID NO: 4906), KYATTADGD (SEQ ID NO: 4907), KGYATD (SEQ ID NO: 4908), KGYATTD (SEQ ID NO: 4909), KGYATTAD (SEQ ID NO: 4910), KGYATTADD (SEQ ID NO: 4911), KGYATTADGD (SEQ ID NO: 4912), KAYATD (SEQ ID NO: 4913), KAYATTD (SEQ ID NO: 4914), KAYATTAD (SEQ ID NO: 4915), KAYATTADD (SEQ ID NO: 4916), KAYATTADGD (SEQ ID NO: 4917), KYGYATD (SEQ ID NO: 4918), KYGYATTD (SEQ ID NO: 4919), KYGYATTAD (SEQ ID NO: 4920), KYGYATTADD (SEQ ID NO: 4921), KYGYATTADGD (SEQ ID NO: 4922), KYAYATD (SEQ ID NO: 4923), KYAYATTD (SEQ ID NO: 4924), KYAYATTAD (SEQ ID NO: 4925), KYAYATTADD (SEQ ID NO: 4926), KYAYATTADGD (SEQ ID NO: 4927), KLYGYATD (SEQ ID NO: 4928), KLYGYATTD (SEQ ID NO: 4929), KLYGYATTAD (SEQ ID NO: 4930), KLYGYATTADD (SEQ ID NO: 4931), KLYGYATTADGD (SEQ ID NO: 4932), KLYAYATD (SEQ ID NO: 4933), KLYAYATTD (SEQ ID NO: 4934), KLYAYATTAD (SEQ ID NO: 4395), KLYAYATTADD (SEQ ID NO: 4936), KLYAYATTADGD (SEQ ID NO: 4937), KVYGYATD (SEQ ID NO: 4938), KVYGYATTD (SEQ ID NO: 4939), KVYGYATTAD (SEQ ID NO: 4940), KVYGYATTADD (SEQ ID NO: 4941), KVYGYATTADGD (SEQ ID NO: 4942), KVYAYATD (SEQ ID NO: 4943), KVYAYATTD (SEQ ID NO: 4944), KVYAYATTAD (SEQ ID NO: 4945), KVYAYATTADD (SEQ ID NO: 4946), KVYAYATTADGD (SEQ ID NO: 4947), KIYGYATD (SEQ ID NO: 4948), KIYGYATTD (SEQ ID NO: 4949), KIYGYATTAD (SEQ ID NO: 4950), KIYGYATTADD (SEQ ID NO: 4951), KIYGYATTADGD (SEQ ID NO: 4952), KIYAYATD (SEQ ID NO: 4953), KIYAYATTD (SEQ ID NO: 4954), KIYAYATTAD (SEQ ID NO: 4955), KIYAYATTADD (SEQ ID NO: 4956), KIYAYATTADGD (SEQ ID NO: 4957), YATTA (SEQ ID NO: 4958), YATTAD (SEQ ID NO: 4959), YATTADG (SEQ ID NO: 4960), GYATT (SEQ ID NO: 4961), GYATTA (SEQ ID NO: 4962), GYATTAD (SEQ ID NO: 4963), GYATTADG (SEQ ID NO: 4964), AYATT (SEQ ID NO: 4965), AYATTA (SEQ ID NO: 4966), AYATTAD (SEQ ID NO: 4967), AYATTADG (SEQ ID NO: 4968), YGYAT (SEQ ID NO: 4969), YGYATT (SEQ ID NO: 4970), YGYATTA (SEQ ID NO: 4971), YGYATTAD (SEQ ID NO: 4972), YGYATTADG (SEQ ID NO: 4973), YAYAT (SEQ ID NO: 4974), YAYATT (SEQ ID NO: 4975), YAYATTA (SEQ ID NO: 4976), YAYATTAD (SEQ ID NO: 4977), YAYATTADG (SEQ ID NO: 4978), LYGYAT (SEQ ID NO: 4979), LYGYATT (SEQ ID NO: 4980), LYGYATTA (SEQ ID NO: 4981), LYGYATTAD (SEQ ID NO: 4982), LYGYATTADG (SEQ ID NO: 4983), LYAYAT (SEQ ID NO: 4984), LYAYATT (SEQ ID NO: 4985), LYAYATTA (SEQ ID NO: 4986), LYAYATTAD (SEQ ID NO: 4987), LYAYATTADG (SEQ ID NO: 4988), VYGYAT (SEQ ID NO: 4989), VYGYATT (SEQ ID NO: 4990), VYGYATTA (SEQ ID NO: 4991), VYGYATTAD (SEQ ID NO: 4992), VYGYATTADG (SEQ ID NO: 4993), VYAYAT (SEQ ID NO: 4994), VYAYATT (SEQ ID NO: 4995), VYAYATTA (SEQ ID NO: 4996), VYAYATTAD (SEQ ID NO: 4997), VYAYATTADG (SEQ ID NO: 4998), IYGYAT (SEQ ID NO: 4999), IYGYATT (SEQ ID NO: 5000), IYGYATTA (SEQ ID NO: 5001), IYGYATTAD (SEQ ID NO: 5002), IYGYATTADG (SEQ ID NO: 5003), IYAYAT (SEQ ID NO: 5004), IYAYATT (SEQ ID NO: 5005), IYAYATTA (SEQ ID NO: 5006), IYAYATTAD (SEQ ID NO: 5007) and IYAYATTADG (SEQ ID NO: 5008).

[0148] Representative cyclic peptides comprising a desmocollin-2 CAR sequence include: CFATC (SEQ ID NO: 5009), CFATTC (SEQ ID NO: 5010), CFATTPC (SEQ ID NO: 5011), CFATTPDC (SEQ ID NO: 5012), CFATTPDGC (SEQ ID NO: 5013), CAFATC (SEQ ID NO: 5014), CAFATTC (SEQ ID NO: 5015), CAFATTPC (SEQ ID NO: 5016), CAFATTPDC (SEQ ID NO: 5017), CAFATTPDGC (SEQ ID NO: 5018), CIAFATC (SEQ ID NO: 5019), CIAFATTC (SEQ ID NO: 5020), CIAFATTPC (SEQ ID NO: 5021), CIAFATTPDC (SEQ ID NO: 5022), CIAFATTPDGC (SEQ ID NO: 5023), CIIAFATC (SEQ ID NO: 5024), CIIAFATTC (SEQ ID NO: 5025), CIIAFATTPC (SEQ ID NO: 5026), CIIAFATTPDC (SEQ ID NO: 5027), CIIAFATTPDGC (SEQ ID NO: 5028), CLIAFATC (SEQ ID NO: 5029), CLIAFATTC (SEQ ID NO: 5030), CLIAFATTPC (SEQ ID NO: 5031), CLIAFATTPDC (SEQ ID NO: 5032), CLIAFATTPDGC (SEQ ID NO: 5033), EFATK (SEQ ID NO: 5034), EFATTK (SEQ ID NO: 5035), EFATTPK (SEQ ID NO: 5036), EFATTPDK (SEQ ID NO: 5037), EFATTPDGK (SEQ ID NO: 5038), EAFATK (SEQ ID NO: 5039), EAFATTK (SEQ ID NO: 5040), EAFATTPK (SEQ ID NO: 5041), EAFATTPDK (SEQ ID NO: 5042), EAFATTPDGK (SEQ ID NO: 5043), EIAFATK (SEQ ID NO: 5044), EIAFATTK (SEQ ID NO: 5045), EIAFATTPK (SEQ ID NO: 5046), EIAFATTPDK (SEQ ID NO: 5047), EIAFATTPDGK (SEQ ID NO: 5048), EIIAFATK (SEQ ID NO: 5049), EIIAFATTK (SEQ ID NO: 5050), EIIAFATTPK (SEQ ID NO: 5051), EIIAFATTPDK (SEQ ID NO: 5052), EIIAFATTPDGK (SEQ ID NO: 5053), ELIAFATK (SEQ ID NO: 5054), ELIAFATTK (SEQ ID NO: 5055), ELIAFATTPK (SEQ ID NO: 5056), ELIAFATTPDK (SEQ ID NO: 5057), ELIAFATTPDGK (SEQ ID NO: 5058), KFATE (SEQ ID NO: 5059), KFATTE (SEQ ID NO: 5060), KFATTPE (SEQ ID NO: 5061), KFATTPDE (SEQ ID NO: 5062), KFATTPDGE (SEQ ID NO: 5063), KAFATE (SEQ ID NO: 5064), KAFATTE (SEQ ID NO: 5065), KAFATTPE (SEQ ID NO: 5066), KAFATTPDE (SEQ ID NO: 5067), KAFATTPDGE (SEQ ID NO: 5068), KIAFATE (SEQ ID NO: 5069), KIAFATTE (SEQ ID NO: 5070), KIAFATTPE (SEQ ID NO: 5071), KIAFATTPDE (SEQ ID NO: 5072), KIAFATTPDGE (SEQ ID NO: 5073), KIIAFATE (SEQ ID NO: 5074), KIIAFATTE (SEQ ID NO: 5075), KIIAFATTPE (SEQ ID NO: 5076), KIIAFATTPDE (SEQ ID NO: 5077), KIIAFATTPDGE (SEQ ID NO: 5078), KLIAFATE (SEQ ID NO: 5079), KLIAFATTE (SEQ ID NO: 5080), KLIAFATTPE (SEQ ID NO: 5081), KLIAFATTPDE (SEQ ID NO: 5082), KLIAFATTPDGE (SEQ ID NO: 5083), DFATK (SEQ ID NO: 5084), DFATTK (SEQ ID NO: 5085), DFATTPK (SEQ ID NO: 5086), DFATTPDK (SEQ ID NO: 5087), DFATTPDGK (SEQ ID NO: 5088), DAFATK (SEQ ID NO: 5089), DAFATTK (SEQ ID NO: 5090), DAFATTPK (SEQ ID NO: 5091), DAFATTPDK (SEQ ID NO: 5092), DAFATTPDGK (SEQ ID NO: 5093), DIAFATK (SEQ ID NO: 5094), DIAFATTK (SEQ ID NO: 5095), DIAFATTPK (SEQ ID NO: 5096), DIAFATTPDK (SEQ ID NO: 5097), DIAFATTPDGK (SEQ ID NO: 5098), DIIAFATK (SEQ ID NO: 5099), DIIAFATTK (SEQ ID NO: 5100), DIIAFATTPK (SEQ ID NO: 5101), DIIAFATTPDK (SEQ ID NO: 5102), DIIAFATTPDGK (SEQ ID NO: 5103), DLIAFATK (SEQ ID NO: 5104), DLIAFATTK (SEQ ID NO: 5105), DLIAFATTPK (SEQ ID NO: 5106), DLIAFATTPDK (SEQ ID NO: 5107), DLIAFATTPDGK (SEQ ID NO: 5108), KFATD (SEQ ID NO: 5109), KFATTD (SEQ ID NO: 5110), KFATTPD (SEQ ID NO: 5111), KFATTPDD (SEQ ID NO: 5112), KFATTPDGD (SEQ ID NO: 5113), KAFATD (SEQ ID NO: 5114), KAFATTD (SEQ ID NO: 5115), KAFATTPD (SEQ ID NO: 5116), KAFATTPDD (SEQ ID NO: 5117), KAFATTPDGD (SEQ ID NO: 5118), KIAFATD (SEQ ID NO: 5119), KIAFATTD (SEQ ID NO: 5120), KIAFATTPD (SEQ ID NO: 5121), KIAFATTPDD (SEQ ID NO: 5122), KIAFATTPDGD (SEQ ID NO: 5123), KIIAFATD (SEQ ID NO: 5124), KIIAFATTD (SEQ ID NO: 5125), KIIAFATTPD (SEQ ID NO: 5126), KIIAFATTPDD (SEQ ID NO: 5127), KIIAFATTPDGD (SEQ ID NO: 5128), KLIAFATD (SEQ ID NO: 5129), KLIAFATTD (SEQ ID NO: 5130), KLIAFATTPD (SEQ ID NO: 5131), KLIAFATTPDD (SEQ ID NO: 5132), KLIAFATTPDGD (SEQ ID NO: 5133), FATTP (SEQ ID NO: 5134), FATTPD (SEQ ID NO: 5135), FATTPDG (SEQ ID NO: 5136), AFATT (SEQ ID NO: 5137), AFATTP (SEQ ID NO: 5138), AFATTPD (SEQ ID NO: 5139), AFATTPDG (SEQ ID NO: 5140), IAFAT (SEQ ID NO: 5141), IAFATT (SEQ ID NO: 5142), IAFATTP (SEQ ID NO: 5143), IAFATTPD (SEQ ID NO: 5144), IAFATTPDG (SEQ ID NO: 5145), IIAFAT (SEQ ID NO: 5146), IIAFATT (SEQ ID NO: 5147), IIAFATTP (SEQ ID NO: 5148), IIAFATTPD (SEQ ID NO: 5149), IIAFATTPDG (SEQ ID NO: 5150), LIAFAT (SEQ ID NO: 5151), LIAFATT (SEQ ID NO: 5152), LIAFATTP (SEQ ID NO: 5153), LIAFATTPD (SEQ ID NO: 5154), LIAFATTPDG (SEQ ID NO: 5155).

[0149] Representative cyclic peptides comprising a desmocollin-3 or desmocollin-4 CAR sequence include: CYASC (SEQ ID NO: 5156), CYASTC (SEQ ID NO: 5157), CYASTAC (SEQ ID NO: 5158), CYASTADC (SEQ ID NO: 5159), CYASTADGC (SEQ ID NO: 5160), CAYASC (SEQ ID NO: 5161), CAYASTC (SEQ ID NO: 5162), CAYASTAC (SEQ ID NO: 5163), CAYASTADC (SEQ ID NO: 5164), CAYASTADGC (SEQ ID NO: 5165), CIAYASC (SEQ ID NO: 5166), CIAYASTC (SEQ ID NO: 5167), CIAYASTAC (SEQ ID NO: 5168), CIAYASTADC (SEQ ID NO: 5169), CIAYASTADGC (SEQ ID NO: 5170), CLIAYASC (SEQ ID NO: 5171), CLIAYASTC (SEQ ID NO: 5172), CLIAYASTAC (SEQ ID NO: 5173), CLIAYASTADC (SEQ ID NO: 5174), CLIAYASTADGC (SEQ ID NO: 5175), EYASK (SEQ ID NO: 5176), EYASTK (SEQ ID NO: 5177), EYASTAK (SEQ ID NO: 5178), EYASTADK (SEQ ID NO: 5179), EYASTADGK (SEQ ID NO: 5180), EAYASK (SEQ ID NO: 5181), EAYASTK (SEQ ID NO: 5182), EAYASTAK (SEQ ID NO: 5183), EAYASTADK (SEQ ID NO: 5184), EAYASTADGK (SEQ ID NO: 5185), EIAYASK (SEQ ID NO: 5186), EIAYASTK (SEQ ID NO: 5187), EIAYASTAK (SEQ ID NO: 5188), EIAYASTADK (SEQ ID NO: 5189), EIAYASTADGK (SEQ ID NO: 5190), ELIAYASK (SEQ ID NO: 5191), ELIAYASTK (SEQ ID NO: 5192), ELIAYASTAK (SEQ ID NO: 5193), ELIAYASTADK (SEQ ID NO: 5194), ELIAYASTADGK (SEQ ID NO: 5195), KYASE (SEQ ID NO: 5196), KYASTE (SEQ ID NO: 5197), KYASTAE (SEQ ID NO: 5198), KYASTADE (SEQ ID NO: 5199), KYASTADGE (SEQ ID NO: 5200), KAYASE (SEQ ID NO: 5201), KAYASTE (SEQ ID NO: 5202), KAYASTAE (SEQ ID NO: 5203), KAYASTADE (SEQ ID NO: 5204), KAYASTADGE (SEQ ID NO: 5205), KIAYASE (SEQ ID NO: 5206), KIAYASTE (SEQ ID NO: 5207), KIAYASTAE (SEQ ID NO: 5208), KIAYASTADE (SEQ ID NO: 5209), KIAYASTADGE (SEQ ID NO: 5210), KLIAYASE (SEQ ID NO: 5211), KLIAYASTE (SEQ ID NO: 5212), KLIAYASTAE (SEQ ID NO: 5213), KLIAYASTADE (SEQ ID NO: 5214), KLIAYASTADGE (SEQ ID NO: 5215), DYASK (SEQ ID NO: 5216), DYASTK (SEQ ID NO: 5217), DYASTAK (SEQ ID NO: 5218), DYASTADK (SEQ ID NO: 5219), DYASTADGK (SEQ ID NO: 5220), DAYASK (SEQ ID NO: 5221), DAYASTK (SEQ ID NO: 5222), DAYASTAK (SEQ ID NO: 5223), DAYASTADK (SEQ ID NO: 5224), DAYASTADGK (SEQ ID NO: 5225), DIAYASK (SEQ ID NO: 5226), DIAYASTK (SEQ ID NO: 5227), DIAYASTAK (SEQ ID NO: 5228), DIAYASTADK (SEQ ID NO: 5229), DIAYASTADGK (SEQ ID NO: 5230), DLIAYASK (SEQ ID NO: 5231), DLIAYASTK (SEQ ID NO: 5232), DLIAYASTAK (SEQ ID NO: 5233), DLIAYASTADK (SEQ ID NO: 5234), DLIAYASTADGK (SEQ ID NO: 5235), KYASD (SEQ ID NO: 5236), KYASTD (SEQ ID NO: 5237), KYASTAD (SEQ ID NO: 5238), KYASTADD (SEQ ID NO: 5239), KYASTADGD (SEQ ID NO: 5240), KAYASD (SEQ ID NO: 5241), KAYASTD (SEQ ID NO: 5242), KAYASTAD (SEQ ID NO: 5243), KAYASTADD (SEQ ID NO: 5244), KAYASTADGD (SEQ ID NO: 5245), KIAYASD (SEQ ID NO: 5246), KIAYASTD (SEQ ID NO: 5247), KIAYASTAD (SEQ ID NO: 5248), KIAYASTADD (SEQ ID NO: 5249), KIAYASTADGD (SEQ ID NO: 5250), KLIAYASD (SEQ ID NO: 5251), KLIAYASTD (SEQ ID NO: 5252), KLIAYASTAD (SEQ ID NO: 5253), KLIAYASTADD (SEQ ID NO: 5254), KLIAYASTADGD (SEQ ID NO: 5255), YASTA (SEQ ID NO: 5256), YASTAD (SEQ ID NO: 5257), YASTADG (SEQ ID NO: 5258), AYAST (SEQ ID NO: 5259), AYASTA (SEQ ID NO: 5260), AYASTAD (SEQ ID NO: 5261), AYASTADG (SEQ ID NO: 5262), IAYAS (SEQ ID NO: 5263), IAYAST (SEQ ID NO: 5264), IAYASTA (SEQ ID NO: 5265), IAYASTAD (SEQ ID NO: 5266), IAYASTADG (SEQ ID NO: 5267), LIAYAS (SEQ ID NO: 5268), LIAYAST (SEQ ID NO: 5269), LIAYASTA (SEQ ID NO: 5270), LIAYASTAD (SEQ ID NO: 5271) and LIAYASTADG (SEQ ID NO: 5272).

[0150] Representative cyclic peptides comprising a cnr CAR sequence include: CDPVC (SEQ ID NO:3572), CDPVSC (SEQ ID NO:3573), CDPVSGC (SEQ ID NO:3574), CIDPVC (SEQ ID NO:3575), CIDPVSC (SEQ ID NO:3576), CIDPVSGC (SEQ ID NO:3577), CHIDPVC (SEQ ID NO:3578), CHIDPVSC (SEQ ID NO:3579), CHIDPVSGC (SEQ ID NO:3580), CFHIDPVC (SEQ ID NO:3581), CFHIDPVSC (SEQ ID NO:3582), CFHIDPVSGC (SEQ ID NO:3583), CKFHIDPVC (SEQ ID NO:3584), CKFHIDPVSC (SEQ ID NO:3585), CKFHIDPVSGC (SEQ ID NO:3586), CDADC (SEQ ID NO:3587), CDADTC (SEQ ID NO:3588), CDADTGC (SEQ ID NO:3589), CIDADTC (SEQ ID NO:3590), CIDADC (SEQ ID NO:3591), CIDADTGC (SEQ ID NO:3592), CSIDADC (SEQ ID NO:3593), CSIDADTC (SEQ ID NO:3594), CSIDADTGC (SEQ ID NO:3595), CFSIDADC (SEQ ID NO:3596), CFSIDADTC (SEQ ID NO:3597), CFSIDADTGC (SEQ ID NO:3598), CQFSIDADC (SEQ ID NO:3599), CQFSIDADTC (SEQ ID NO:3600), CQFSIDADTGC (SEQ ID NO:3601), CDSVC (SEQ ID NO:3602), CDSVSC (SEQ ID NO:3603), CDSVSGC (SEQ ID NO:3604), CIDSVC (SEQ ID NO:3605), CIDSVSC (SEQ ID NO:3606), CIDSVSGC (SEQ ID NO:3607), CHIDSVC (SEQ ID NO:3608), CHIDSVSC (SEQ ID NO:3609), CHIDSVSGC (SEQ ID NO:3610), CFHIDSVC (SEQ ID NO:3611), CFHIDSVSC (SEQ ID NO:3612), CFHIDSVSGC (SEQ ID NO:3613), CTFHIDSVC (SEQ ID NO:3614), CTFHIDSVSC (SEQ ID NO:3615), CTFHIDSVSGC (SEQ ID NO:3616), CDSNC (SEQ ID NO:3617), CDSNSC (SEQ ID NO:3618), CDSNSGC (SEQ ID NO:3619), CIDSNC (SEQ ID NO:3620), CIDSNSC (SEQ ID NO:3621), CIDSNSGC (SEQ ID NO:3622), CNIDSNC (SEQ ID NO:3623), CNIDSNSC (SEQ ID NO:3624), CNIDSNSGC (SEQ ID NO:3625), CFNIDSNC (SEQ ID NO:3626), CFNIDSNSC (SEQ ID NO:3627), CFNIDSNSGC (SEQ ID NO:3628), CAFNIDSNC (SEQ ID NO:3629), CAFNIDSNSC (SEQ ID NO:3631), CAFNIDSNSGC (SEQ ID NO:3632), CDSSC (SEQ ID NO:3633), CDSSSC (SEQ ID NO:3634), CDSSSGC (SEQ ID NO:3635), CIDSSC (SEQ ID NO:3636), CIDSSSC (SEQ ID NO:3637), CIDSSSGC (SEQ ID NO:3638), CTIDSSC (SEQ ID NO:3639), CTIDSSSC (SEQ ID NO:3640), CTIDSSSGC (SEQ ID NO:3641), CFTIDSSC (SEQ ID NO:3642), CFTIDSSSC (SEQ ID NO:3643), CFTIDSSSGC (SEQ ID NO:3644), CKFTIDSSC (SEQ ID NO:3645), CKFTIDSSSC (SEQ ID NO:3646), CKFTIDSSSGC (SEQ ID NO:3647), CDEKC (SEQ ID NO:3648), CDEKNC (SEQ ID NO:3649), CDEKNGC (SEQ ID NO:3650), CLDEKC (SEQ ID NO:3651), CLDEKNC (SEQ ID NO:3652), CLDEKNGC (SEQ ID NO:3653), CTLDEKC (SEQ ID NO:3654), CTLDEKNC (SEQ ID NO:3655), CTLDEKNGC (SEQ ID NO:3656), CFTLDEKC (SEQ ID NO:3657), CFTLDEKNC (SEQ ID NO:3658), CFTLDEKNGC (SEQ ID NO:3659), CLFTLDEKC (SEQ ID NO:3660), CLFTLDEKNC (SEQ ID NO:3661), CLFTLDEKNGC (SEQ ID NO:3662), CNEKC (SEQ ID NO:3663), CNEKTC (SEQ ID NO:3664), CNEKTGC (SEQ ID NO:3665), CINEKC (SEQ ID NO:3666), CINEKTC (SEQ ID NO:3667), CINEKTGC (SEQ ID NO:3668), CLINEKC (SEQ ID NO:3669), CLINEKTC (SEQ ID NO:3670), CLINEKTGC (SEQ ID NO:3671), CFLINEKC (SEQ ID NO:3672), CFLINEKTC (SEQ ID NO:3673), CFLINEKTGC (SEQ ID NO:3674), CKFLINEKC (SEQ ID NO:3675), CKFLINEKTC (SEQ ID NO:3676), CKFLINEKTGC (SEQ ID NO:3677), EDPVK (SEQ ID NO:3678), EDPVSK (SEQ ID NO:3679), EDPVSGK (SEQ ID NO:3680), EIDPVK (SEQ ID NO:3681), EIDPVSK (SEQ ID NO:3682), EIDPVSGK (SEQ ID NO:3683), EHIDPVK (SEQ ID NO:3684), EHIDPVSK (SEQ ID NO:3685), EHIDPVSGK (SEQ ID NO:3686), EFHIDPVK (SEQ ID NO:3687), EFHIDPVSK (SEQ ID NO:3688), EFHIDPVSGK (SEQ ID NO:3689), EKFHIDPVK (SEQ ID NO:3690), EKFHIDPVSK (SEQ ID NO:3691), EKFHIDPVSGK (SEQ ID NO:3692), EDADK (SEQ ID NO:3693), EDADTK (SEQ ID NO:3694), EDADTGK (SEQ ID NO:3695), EIDADK (SEQ ID NO:3696), EIDADTK (SEQ ID NO:3697), EIDADTGK (SEQ ID NO:3698), ESIDADK (SEQ ID NO:3699), ESIDADTK (SEQ ID NO:3700), ESIDADTGK (SEQ ID NO:3701), EFSIDADK (SEQ ID NO:3702), EFSIDADTK (SEQ ID NO:3703), EFSIDADTGK (SEQ ID NO:3704), EQFSIDADK (SEQ ID NO:3705), EQFSIDADTK (SEQ ID NO:3706), EQFSIDADTGK (SEQ ID NO:3707), EDSVK (SEQ ID NO:3708), EDSVSK (SEQ ID NO:3709), EDSVSGK (SEQ ID NO:3710), EIDSVK (SEQ ID NO:3711), EIDSVSK (SEQ ID NO:3712), EIDSVSGK (SEQ ID NO:3713), EHIDSVK (SEQ ID NO:3714), EHIDSVSK (SEQ ID NO:3715), EHIDSVSGK (SEQ ID NO:3716), EFHIDSVK (SEQ ID NO:3717), EFHIDSVSK (SEQ ID NO:3718), EFHIDSVSGK (SEQ ID NO:3719), ETFHIDSVK (SEQ ID NO:3720), ETFHIDSVSK (SEQ ID NO:3721), ETFHIDSVSGK (SEQ ID NO:3722), EDSNK (SEQ ID NO:3723), EDSNSK (SEQ ID NO:3724), EDSNSGK (SEQ ID NO:3725), EIDSNK (SEQ ID NO:3726), EIDSNSK (SEQ ID NO:3727), EIDSNSGK (SEQ ID NO:3728), ENIDSNK (SEQ ID NO:3729), ENIDSNSK (SEQ ID NO:3730), ENIDSNSGK (SEQ ID NO:3731), EFNIDSNK (SEQ ID NO:3732), EFNIDSNSK (SEQ ID NO:3733), EFNIDSNSGK (SEQ ID NO:3734), EAFNIDSNK (SEQ ID NO:3735), EAFNIDSNSK (SEQ ID NO:3737), EAFNIDSNSGK (SEQ ID NO:3738), EDSSK (SEQ ID NO:3739), EDSSSK (SEQ ID NO:3740), EDSSSGK (SEQ ID NO:3741), EIDSSK (SEQ ID NO:3742), EIDSSSK (SEQ ID NO:3743), EIDSSSGK (SEQ ID NO:3744), ETIDSSK (SEQ ID NO:3745), ETIDSSSK (SEQ ID NO:3746), ETIDSSSGK (SEQ ID NO:3747), EFTIDSSK (SEQ ID NO:3748), EFTIDSSSK (SEQ ID NO:3749), EFTIDSSSGK (SEQ ID NO:3750), EKFTIDSSK (SEQ ID NO:3751), EKFTIDSSSK (SEQ ID NO:3752), EKFTIDSSSGK (SEQ ID NO:3753), EDEKK (SEQ ID NO:3754), EDEKNK (SEQ ID NO:3755), EDEKNGK (SEQ ID NO:3756), ELDEKK (SEQ ID NO:3757), ELDEKNK (SEQ ID NO:3758), ELDEKNGK (SEQ ID NO:3759), ETLDEKK (SEQ ID NO:3760), ETLDEKNK (SEQ ID NO:3761), ETLDEKNGK (SEQ ID NO:3762), EFTLDEKK (SEQ ID NO:3763), EFTLDEKNK (SEQ ID NO:3764), EFTLDEKNGK (SEQ ID NO:3765), ELFTLDEKK (SEQ ID NO:3766), ELFTLDEKNK (SEQ ID NO:3767), ELFTLDEKNGK (SEQ ID NO:3768), ENEKK (SEQ ID NO:3769), ENEKTK (SEQ ID NO:3770), ENEKTGK (SEQ ID NO:3771), EINEKK (SEQ ID NO:3772), EINEKTK (SEQ ID NO:3773), EINEKTGK (SEQ ID NO:3774), ELINEKK (SEQ ID NO:3775), ELINEKTK (SEQ ID NO:3776), ELINEKTGK (SEQ ID NO:3777), EFLINEKK (SEQ ID NO:3778), EFLINEKTK (SEQ ID NO:3779), EFLINEKTGK (SEQ ID NO:3780), EKFLINEKK (SEQ ID NO:3781), EKFLINEKTK (SEQ ID NO:3782), EKFLINEKTGK (SEQ ID NO:3783), KDPVD (SEQ ID NO:3784), KDPVSD (SEQ ID NO:3785), KDPVSGD (SEQ ID NO:3786), KIDPVD (SEQ ID NO:3787), KIDPVSD (SEQ ID NO:3788), KIDPVSGD (SEQ ID NO:3789), KHIDPVD (SEQ ID NO:3790), KHIDPVSD (SEQ ID NO:3791), KHIDPVSGD (SEQ ID NO:3792), KFHIDPVD (SEQ ID NO:3793), KFHIDPVSD (SEQ ID NO:3794), KFHIDPVSGD (SEQ ID NO:3795), KKFHIDPVD (SEQ ID NO:3796), KKFHIDPVSD (SEQ ID NO:3797), KKFHIDPVSGD (SEQ ID NO:3798), KDADD (SEQ ID NO:3799), KDADTD (SEQ ID NO:3800), KDADTGD (SEQ ID NO:3801), KIDADD (SEQ ID NO:3802), KIDADTD (SEQ ID NO:3803), KIDADTGD (SEQ ID NO:3804), KSIDADD (SEQ ID NO:3805), KSIDADTD (SEQ ID NO:3806), KSIDADTGD (SEQ ID NO:3807), KFSIDADD (SEQ ID NO:3808), KFSIDADTD (SEQ ID NO:3809), KFSIDADTGD (SEQ ID NO:3810), KOFSIDADD (SEQ ID NO:3811), KQFSIDADTD (SEQ ID NO:3812), KOFSIDADTGD (SEQ ID NO:3813), KDSVD (SEQ ID NO:3814), KDSVSD (SEQ ID NO:3815), KDSVSGD (SEQ ID NO:3816), KIDSVD (SEQ ID NO:3817), KIDSVSD (SEQ ID NO:3818), KIDSVSGD (SEQ ID NO:3819), KHIDSVD (SEQ ID NO:3820), KHIDSVSD (SEQ ID NO:3821), KHIDSVSGD (SEQ ID NO:3822), KFHIDSVD (SEQ ID NO:3823), KFHIDSVSD (SEQ ID NO:3824), KFHIDSVSGD (SEQ ID NO:3825), KTFHIDSVD (SEQ ID NO:3826), KTFHIDSVSD (SEQ ID NO:3827), KTFHIDSVSGD (SEQ ID NO:3828), KDSND (SEQ ID NO:3829), KDSNSD (SEQ ID NO:3830), KDSNSGD (SEQ ID NO:3831), KIDSND (SEQ ID NO:3832), KIDSNSD (SEQ ID NO:3833), KIDSNSGD (SEQ ID NO:3834), KNIDSND (SEQ ID NO:3835), KNIDSNSD (SEQ ID NO:3836), KNIDSNSGD (SEQ ID NO:3837), KFNIDSND (SEQ ID NO:3838), KFNIDSNSD (SEQ ID NO:3839), KFNIDSNSGD (SEQ ID NO:3840), KAFNIDSND (SEQ ID NO:3841), KAFNIDSNSD (SEQ ID NO:3843), KAFNIDSNSGD (SEQ ID NO:3844), KDSSD (SEQ ID NO:3845), KDSSSD (SEQ ID NO:3846), KDSSSGD (SEQ ID NO:3847), KIDSSD (SEQ ID NO:3848), KIDSSSD (SEQ ID NO:3849), KIDSSSGD (SEQ ID NO:3850), KTIDSSD (SEQ ID NO:3851), KTIDSSSD (SEQ ID NO:3852), KTIDSSSGD (SEQ ID NO:3853), KFTIDSSD (SEQ ID NO:3854), KFTIDSSSD (SEQ ID NO:3855), KFTIDSSSGD (SEQ ID NO:3856), KKFTIDSSD (SEQ ID NO:3857), KKFTIDSSSD (SEQ ID NO:3858), KKFTIDSSSGD (SEQ ID NO:3859), KDEKD (SEQ ID NO:3860), KDEKND (SEQ ID NO:3861), KDEKNGD (SEQ ID NO:3862), KLDEKD (SEQ ID NO:3863), KLDEKND (SEQ ID NO:3864), KLDEKNGD (SEQ ID NO:3865), KTLDEKD (SEQ ID NO:3866), KTLDEKND (SEQ ID NO:3867), KTLDEKNGD (SEQ ID NO:3868), KFTLDEKD (SEQ ID NO:3869), KFTLDEKND (SEQ ID NO:3870), KFTLDEKNGD (SEQ ID NO:3871), KLFTLDEKD (SEQ ID NO:3872), KLFTLDEKND (SEQ ID NO:3873), KLFTLDEKNGD (SEQ ID NO:3874), KNEKD (SEQ ID NO:3875), KNEKTD (SEQ ID NO:3876), KNEKTGD (SEQ ID NO:3877), KINEKD (SEQ ID NO:3878), KINEKTD (SEQ ID NO:3879), KINEKTGD (SEQ ID NO:3880), KLINEKD (SEQ ID NO:3881), KLINEKTD (SEQ ID NO:3882), KLINEKTGD (SEQ ID NO:3883), KFLINEKD (SEQ ID NO:3884), KFLINEKTD (SEQ ID NO:3885), KFLINEKTGD (SEQ ID NO:3886), KKFLINEKD (SEQ ID NO:3887), KKFLINEKTD (SEQ ID NO:3888) and KKFLINEKTGD (SEQ ID NO:3889).

[0151] For example, cyclic peptides may comprise any of the above OB-cadherin CAR sequence(s). Representative cyclic peptides include CDDKC (SEQ ID NO669), CIDDKC (SEQ ID NO:670), CDDKSC (SEQ ID NO:671), CVIDDKC (SEQ ID NO:672), CIDDKSC (SEQ ID NO:673), CVIDDKSC (SEQ ID NO:674), CDDKSGC (SEQ ID NO:675), CIDDKSGC (SEQ ID NO:676), CVIDDKSGC (SEQ ID NO:677), CFVIDDKC (SEQ ID NO:678), CFVIDDKSC (SEQ ID NO:679), CFVIDDKSGC (SEQ ID NO:680), CIFVIDDKC (SEQ ID NO:681), CIFVIDDKSC (SEQ ID NO:682), CIFVIDDKSGC (SEQ ID NO:683), DDDKK (SEQ ID NO:684), DIDDKK (SEQ ID NO:685), DVIDDKK (SEQ ID NO:686), DFVIDDKK (SEQ ID NO:687), DIFVIDDKK (SEQ ID NO:688), EDDKK (SEQ ID NO:689), EIDDKK (SEQ ID NO:690), EVIDDKK (SEQ ID NO:691), EFVIDDKK (SEQ ID NO:692), EIFVIDDKK (SEQ ID NO:693), FVIDDK (SEQ ID NO:694), FVIDDKS (SEQ ID NO:695), FVIDDKSG (SEQ ID NO:696), KDDKD (SEQ ID NO:697), KIDDKD (SEQ ID NO:698), KDDKSD (SEQ ID NO:699), KVIDDKD (SEQ ID NO:700), KIDDKSD (SEQ ID NO:701), KVIDDKSD (SEQ ID NO:702), KDDKSGD (SEQ ID NO:703), KIDDKSGD (SEQ ID NO:704), KVIDDKSGD (SEQ ID NO:705), KFVIDDKD (SEQ ID NO:706), KFVIDDKSD (SEQ ID NO:707), KFVIDDKSGD (SEQ ID NO:708), KIFVIDDKD (SEQ ID NO:709), KIFVIDDKSD (SEQ ID NO:710), KIFVIDDKSGD (SEQ ID NO:711), VIDDK (SEQ ID NO:712), IDDKS (SEQ ID NO:713), VIDDKS (SEQ ID NO:714), VIDDKSG (SEQ ID NO:715), DDKSG (SEQ ID NO:716), IDDKSG (SEQ ID NO:717), IFVIDDK (SEQ ID NO:718), IFVIDDKS (SEQ ID NO:719), IFVIDDKSG (SEQ ID NO:720), KDDKE (SEQ ID NO:721), KIDDKE (SEQ ID NO:722), KDDKSE (SEQ ID NO:723), KVIDDKE (SEQ ID NO:724), KIDDKSE (SEQ ID NO:725), KVIDDKSE (SEQ ID NO:726), KDDKSGE (SEQ ID NO:727), KIDDKSGE (SEQ ID NO:728), KVIDDKSGE (SEQ ID NO:729), KFVIDDKE (SEQ ID NO:730), KFVIDDKSE (SEQ ID NO:731), KFVIDDKSGE (SEQ ID NO:732), KIFVIDDKE (SEQ ID NO:733), KIFVIDDKSE (SEQ ID NO:734), KIFVIDDKSGE (SEQ ID NO:735), CEEYC (SEQ ID NO:736), CIEEYC (SEQ ID NO:737), CEEYTC (SEQ ID NO:738), CVIEEYC (SEQ ID NO:739), CIEEYTC (SEQ ID NO:740), CVIEEYTC (SEQ ID NO:741), CEEYTGC (SEQ ID NO:742), CIEEYTGC (SEQ ID NO:743), CVIEEYTGC (SEQ ID NO:744), CFVIEEYC (SEQ ID NO:745), CFVIEEYTC (SEQ ID NO:746), CFVIEEYTGC (SEQ ID NO:747), CFFVIEEYC (SEQ ID NO:748), CFFVIEEYTC (SEQ ID NO:749), CFFVIEEYTGC (SEQ ID NO:750), KEEYD (SEQ ID NO:751), KIEEYD (SEQ ID NO:752), KEEYTD (SEQ ID NO:753), KVIEEYD (SEQ ID NO:754), KIEEYTD (SEQ ID NO:755), KVIEEYTD (SEQ ID NO:756), KEEYTGCD (SEQ ID NO:757), KIEEYTGD (SEQ ID NO:758), KVIEEYTGD (SEQ ID NO:759), KFVIEEYD (SEQ ID NO:760), KFVIEEYTD (SEQ ID NO:761), KFVIEEYTGD (SEQ ID NO:762), KFFVIEEYD (SEQ ID NO:763), KFFVIEEYTD (SEQ ID NO:764), KFFVIEEYTGD (SEQ ID NO:765), EEEYK (SEQ ID NO:766), EIEEYK (SEQ ID NO:767), EEEYTK (SEQ ID NO:768), EVIEEYK (SEQ ID NO:769), EIEEYTK (SEQ ID NO:770), EVIEEYTK (SEQ ID NO:771), EEEYTGK (SEQ ID NO:772), EIEEYTGK (SEQ ID NO:773), EVIEEYTGK (SEQ ID NO:774), EFVIEEYK (SEQ ID NO:775), EFVIEEYTK (SEQ ID NO:776), EFVIEEYTGK (SEQ ID NO:777), EFFVIEEYK (SEQ ID NO:778), EFFVIEEYTK (SEQ ID NO:779), EFFVIEEYTGK (SEQ ID NO:780), DCEEYK NO:825), CSVEAQC (SEQ ID NO:826), CVEAQTC (SEQ ID NO:827), CSVEAQTC (SEQ ID NO:828), CEAQTGC (SEQ ID NO:829), CVEAOTGC (SEQ ID NO:830), CSVEAQTGC (SEQ ID NO:831), CFSVEAQC (SEQ ID NO:832), CFSVEAQTC (SEQ ID NO:833), CFSVEAQTGC (SEQ ID NO:834), CYFSVEAQC (SEQ ID NO:835), CYFSVEAQTC (SEQ ID NO:836), CYFSVEAQTGC (SEQ ID NO:837), KEAQD (SEQ ID NO:838), KVEAQD (SEQ ID NO:839), KEAQTD (SEQ ID NO:840), KSVEAQD (SEQ ID NO:841), KVEAQTD (SEQ ID NO:842), KSVEAQTD (SEQ ID NO:843), KEAQTGD (SEQ ID NO:844), KVEAQTGD (SEQ ID NO:845), KSVEAQTGD (SEQ ID NO:846), KFSVEAQD (SEQ ID NO:847), KFSVEAQTD (SEQ ID NO:848), KFSVEAQTGD (SEQ ID NO:849), KYFSVEAQD (SEQ ID NO:850), KYFSVEAQTD (SEQ ID NO:851), KYFSVEAQTGD (SEQ ID NO:852), EEAQK (SEQ ID NO:853), EVEAQK (SEQ ID NO:854), EEAQTK (SEQ ID NO:855), ESVEAQK (SEQ ID NO:856), EVEAQTK (SEQ ID NO:857), ESVEAQTK (SEQ ID NO:858), EEAQTGK (SEQ ID NO:859), EVEAQTGK (SEQ ID NO:860), ESVEAQTGK (SEQ ID NO:861), EFSVEAQK (SEQ ID NO:862), EFSVEAQTK (SEQ ID NO:863), EFSVEAQTGK (SEQ ID NO:864), EYFSVEAQK (SEQ ID NO:865), EYFSVEAQTK (SEQ ID NO:866), EYFSVEAQTGK (SEQ ID NO:867), DEAQK (SEQ ID NO:868), DVEAQK (SEQ ID NO:869), DEAQTK (SEQ ID NO:870), DSVEAQK (SEQ ID NO:871), DVEAQTK (SEQ ID NO:872), DSVEAQTK (SEQ ID NO:873), DEAQTGK (SEQ ID NO:874), DVEAQTGK (SEQ ID NO:875), DSVEAQTGK (SEQ ID NO:876), DFSVEAQK (SEQ ID NO:877), DFSVEAQTK (SEQ ID NO:878), DFSVEAQTGK (SEQ ID NO:879), DYFSVEAQK (SEQ ID NO:880), DYFSVEAQTK (SEQ ID NO:881), DYFSVEAQTGK (SEQ ID NO:882), KEAQE (SEQ ID NO:883), KVEAQE (SEQ ID NO:884), KEAQTE (SEQ ID NO:885), KSVEAQE (SEQ ID NO:886), KVEAQTE (SEQ ID NO:887), KSVEAQTE (SEQ ID NO:888), KEAQTGE (SEQ ID NO:889), KVEAQTGE (SEQ ID NO:890), KSVEAQTGE (SEQ ID NO:891), KFSVEAQE (SEQ ID NO:892), KFSVEAQTE (SEQ ID NO:893), KFSVEAQTGE (SEQ ID NO:894), KYFSVEAQE (SEQ ID NO:895), KYFSVEAQTE (SEQ ID NO:896), KYFSVEAQTGE (SEQ ID NO:897), SVEAQ (SEQ ID NO:898), VEAQT (SEQ ID NO:899), SVEAQT (SEQ ID NO:900), EAQTG (SEQ ID NO:901), VEAQTG (SEQ ID NO:902), SVEAQTG (SEQ ID NO:903), FSVEAQ (SEQ ID NO:904), FSVEAQT (SEQ ID NO:905), FSVEAQTG (SEQ ID NO:906), YFSVEAQ (SEQ ID NO:907), YFSVEAQT (SEQ ID NO:908) and YFSVEAQTG (SEQ ID NO:909). Within the context of the present invention, underlined sequences are cyclized using any suitable method, as described herein.

[0152] Similarly, cyclic peptides may comprise any of the above cadherin-5 CAR sequence(s). Representative cyclic peptides include: CDAEC (SEQ ID NO:910), CVDAEC (SEQ ID NO:911), CDAETC (SEQ ID NO:912), CRVDAEC (SEQ ID NO:913), CVDAETC (SEQ ID NO:914), CRVDAETC (SEQ ID NO:915), CDAETGC (SEQ ID NO:916), CCDAETGC (SEQ ID NO:917), CRVDAETGC (SEQ ID NO:918), CFRVDAEC (SEQ ID NO:919), CFRVDAETC (SEQ ID NO:920), CFRVDAETGC (SEQ ID NO:921), CVFRVDAEC (SEQ ID NO:922), CVFRVDAETC (SEQ ID NO:923), CVFRVDAETGC (SEQ ID NO:924), DDAEK (SEQ ID NO:925), DVDAEK (SEQ ID NO:926), DRVDAEK (SEQ ID NO:927), DFRVDAEK (SEQ ID NO:928), DVFRVDAEK (SEQ ID NO:929), EDAEK (SEQ ID NO:930), EVDAEK (SEQ ID NO:931), ERVDAEK (SEQ ID NO:932), EFRVDAEK (SEQ ID NO:933), EVFRVDAEK (SEQ ID NO:934), KDAED (SEQ ID NO:935), KVDAED (SEQ ID NO:936), KDAETD (SEQ ID NO:937), KRVDAED (SEQ ID NO:938), KVDAETD (SEQ ID NO:939), KRVDAETD (SEQ ID NO:940), KDAETGD (SEQ ID NO:941), KVDAETGD (SEQ ID NO:942), KRVDAETGD (SEQ ID NO:943), KFRVDAED (SEQ ID NO:944), KFRVDAETD (SEQ ID NO:945), KFRVDAETGD (SEQ ID NO:946), KVFRVDAED (SEQ ID NO:947), KVFRVDAETD (SEQ ID NO:948), KVFRVDAETGD (SEQ ID NO:949), VDAEK (SEQ ID NO:950), IDAES (SEQ ID NO:951), VDAES (SEQ ID NO:952), DAETG (SEQ ID NO:953), VDAETG (SEQ ID NO:954), KDAEE (SEQ ID NO:955), KVDAE (SEQ ID NO:956), KDAETE (SEQ ID NO:957), KRVDAE (SEQ ID NO:958), KVDAETE (SEQ ID NO:959), KRVDAETE (SEQ ID NO:960), KDAETGE (SEQ ID NO:961), KVDAETGE (SEQ ID NO:962), KRVDAETGE (SEQ ID NO:962), KFRVDAE (SEQ ID NO:964), KFRVDAETE (SEQ ID NO:965), KFRVDAETGE (SEQ ID NO:966), KVFRVDAE (SEQ ID NO:967), KVFRVDAETE (SEQ ID NO:968), KVFRVDAETGE (SEQ ID NO:969), VDAET (SEQ ID NO:970), VDAETG (SEQ ID NO:971), DAETG (SEQ ID NO:972), RVDAE (SEQ ID NO:973), RVDAET (SEQ ID NO:974), RVDAETG (SEQ ID NO:975), FRVDAE (SEQ ID NO:976), FRVDAET (SEQ ID NO:977), FRVDAETG (SEQ ID NO:978), VFRVDAE (SEQ ID NO:979), VFRVDAET (SEQ ID NO:980) and VFRVDAETG (SEQ ID NO:981).

[0153] As noted above, certain preferred modulating agents comprise a peptide (containing a nonclassical cadherin CAR sequence or an analogue thereof) in which at least one terminal amino acid residue is modified (e.g., the N-terminal amino group is modified by, for example, acetylation or alkoxybenzylation and/or an amide or ester is formed at the C-terminus). It has been found, within the context of the present invention, that the addition of at least one such group to a linear or cyclic peptide modulating agent may improve the ability of the agent to modulate a nonclassical cadherin-mediated function. Certain preferred modulating agents contain modifications at the N- and C-terminal residues, such as N-Ac-IFVIDDKSG-NH₂ (SEQ ID NO:85), which modulates OB-cadherin mediated functions. Other CAR sequences provided herein are also preferably modified by the addition of one or more terminal groups.

[0154] The present invention further contemplates nonclassical cadherin CAR sequences from other organisms. Such CAR sequences may be identified based upon sequence similarity to the sequences provided herein, and the ability to modulate a nonclassical cadherin-mediated function such as may be confirmed as described herein.

[0155] Within certain embodiments, as discussed below, cyclic peptides that contain small CAR sequences (e.g., three residues without significant flanking sequences) are preferred for modulating nonclassical cadherin-mediated functions. Such peptides may contain an N-acetyl group and a C-amide group (e.g., the 5-residue ring N-Ac-CDDKC-NH₂ (SEQ ID NO:669) or N-Ac-KDDKD-NH₂ (SEQ ID NO:697), for modulating OB-cadherin mediated functions). Small cyclic peptides may generally be used to specifically modulate adhesion of cancer and/or other cell types by topical administration or by systemic administration, with or without linking a targeting agent to the peptide, as discussed below. Certain representative cyclic peptides comprising an OB-cadherin CAR sequence are shown in FIGS. 4A-4C. Other representative cyclic peptides comprising a nonclassical cadherin CAR sequence are shown in FIGS. 7A-7F.

[0156] Within embodiments in which inhibition of a nonclassical cadherin-interaction is desired, a modulating agent may contain one nonclassical cadherin CAR sequence, or multiple CAR sequences that are adjacent to one another (i.e., without intervening sequences) or in close proximity (i.e., separated by peptide and/or non-peptide linkers to give a distance between the nonclassical CAR sequences that ranges from about 0.1 to 400 nm). A linker may be any molecule (including peptide and/or non-peptide sequences) that does not contain a CAR sequence and that can be covalently linked to at least two peptide sequences. Using a linker, CAR sequence-containing peptides and other peptide or protein sequences may be joined end-to-end (i.e., the linker may be covalently attached to the carboxyl or amino group of each peptide sequence), and/or via side chains. One linker that can be used for such purposes is (H₂N(CH₂)ₙCO₂H), or derivatives thereof, where n ranges from 1 to 4. Other linkers that may be used will be apparent to those of ordinary skill in the art. Peptide and non-peptide linkers may generally be incorporated into a modulating agent using any appropriate method known in the art.

[0157] Within embodiments in which enhancement of cell adhesion mediated by a nonclassical cadherin is desired, a modulating agent may contain multiple nonclassical cadherin CAR sequences, or antibodies that specifically bind to such sequences, joined by linkers as described above. For enhancers of cadherin function, the linker distance should generally be 400-10,000 nm. One linker that can be used for such purposes is (H₂N(CH₂)ₙCO₂H)ₘ, or derivatives thereof, where n ranges from 1 to 10 and m ranges from 1 to 4000. For example, if glycine (H₂NCH₂CO₂H) or a multimer thereof is used as a linker, each glycine unit corresponds to a linking distance of 2.45 angstroms, or 0.245 nm, as determined by calculation of its lowest energy conformation when linked to other amino acids using molecular modeling techniques. Similarly, aminopropanoic acid corresponds to a linking distance of 3.73 angstroms, aminobutanoic acid to 4.96 angstroms, aminopentanoic acid to 6.30 angstroms and amino hexanoic acid to 6.12 angstroms. Enhancement of cell adhesion may also be achieved by attachment of multiple modulating agents to a support material, as discussed further below.

[0158] A modulating agent as described herein may additionally comprise one or more CAR sequences for one or more different adhesion molecules (including, but not limited to, other CAMs) and/or one or more substances, such as antibodies or fragments thereof, that bind to such sequences. Linkers may, but need not, be used to separate such CAR sequence(s) and/or antibody sequence(s) from the CAR sequence(s) and/or each other. Such modulating agents may generally be used within methods in which it is desirable to simultaneously disrupt a function mediated by multiple adhesion molecules. As used herein, an “adhesion molecule” is any molecule that mediates cell adhesion via a receptor on a cell's surface. Adhesion molecules include cell adhesion proteins (e.g., other members of the cadherin gene superfamily, such as N-cadherin and E-cadherin); integrins; extracellular matrix proteins such as laminin, fibronectin, collagens, vitronectin, entactin and tenascin; and members of the immunoglobulin supergene family, such as N-CAM. Preferred CAR sequences for inclusion within a modulating agent include the classical cadherin CAR sequence His-Ala-Val (HAV); Arg-Gly-Asp (RGD), which is bound by integrins (see Cardarelli et al., J. Biol. Chem. 267:23159-64, 1992); Tyr-Ile-Gly-Ser-Arg (YIGSR; SEQ ID NO:48), which is bound by α6β1 integrin; KYSFNYDGSE (SEQ ID NO:49), which is bound by N-CAM; the N-CAM heparin sulfate-binding site IWKHKGRDVILKKDVRF (SEQ ID NO:50); the putative claudin CAR sequence IYSY (SEQ ID NO:51) and/or the occludin CAR sequence LYHY (SEQ ID NO:52). Using linkers, such modulating agents may form linear or branched structures. Within one embodiment, modulating agents having a branched structure comprise four different CAR sequences, such as IFVIDDKSG (SEQ ID NO:85), RGD, YIGSR (SEQ ID NO:48) and HAV. Bi-functional modulating agents that comprise a nonclassical cadherin CAR sequence joined via a linker to a classical cadherin CAR sequence are also preferred for certain embodiments. As noted above, linkers preferably produce a distance between CAR sequences ranging from 0.1 to 10,000 nm, more preferably ranging from 0.1-400 nm. A separation distance between recognition sites may generally be determined according to the desired function of the modulating agent.

[0159] The total number of CAR sequences (including the nonclassical cadherin CAR sequence, with or without other CAR sequences derived from one or more different adhesion molecules) present within a modulating agent may range from 1 to a large number, such as 100, preferably from 1 to 10, and more preferably from 1 to 5. Peptide modulating agents comprising multiple CAR sequences typically contain from 6 (e.g., DDK-HAV) to about 1000 amino acid residues, preferably from 6 to 50 residues. When non-peptide linkers are employed, each CAR sequence of the modulating agent is present within a peptide that generally ranges in size from 3 to 50 residues in length, preferably from 4 to 25 residues, and more preferably from 5 to 15 residues.

[0160] As noted above, modulating agents may be polypeptides or salts thereof, containing only amino acid residues linked by peptide bonds, or may contain non-peptide regions, such as linkers. Peptide regions of a modulating agent may comprise residues of L-amino acids, D-amino acids, or any combination thereof. Amino acids may be from natural or non-natural sources, provided that at least one amino group and at least one carboxyl group are present in the molecule; α- and β-amino acids are generally preferred. The 20 L-amino acids commonly found in proteins are identified herein by the conventional three-letter or one-letter abbreviations, and the corresponding D-amino acids are designated by a lower case one letter symbol.

[0161] A modulating agent may also contain rare amino acids (such as 4-hydroxyproline or hydroxylysine), organic acids or amides and/or derivatives of common amino acids, such as amino acids having the C-terminal carboxylate esterified (e.g., benzyl, methyl or ethyl ester) or amidated and/or having modifications of the N-terminal amino group (e.g., acetylation or alkoxycarbonylation), with or without any of a wide variety of side-chain modifications and/or substitutions (e.g., methylation, benzylation, t-butylation, tosylation, alkoxycarbonylation, and the like). Preferred derivatives include amino acids having a C-terminal amide group. Residues other than common amino acids that may be present with a modulating agent include, but are not limited to, 2-mercaptoaniline, 2-mercaptoproline, ornithine, diaminobutyric acid, α-aminoadipic acid, m-aminomethylbenzoic acid and α,β-diaminopropionic acid.

[0162] Peptide modulating agents (and peptide portions of modulating agents) as described herein may be synthesized by methods well known in the art, including chemical synthesis and recombinant DNA methods. For modulating agents up to about 50 residues in length, chemical synthesis may be performed using solution or solid phase peptide synthesis techniques, in which a peptide linkage occurs through the direct condensation of the α-amino group of one amino acid with the α-carboxy group of the other amino acid with the elimination of a water molecule. Peptide bond synthesis by direct condensation, as formulated above, requires suppression of the reactive character of the amino group of the first and of the carboxyl group of the second amino acid. The masking substituents must permit their ready removal, without inducing breakdown of the labile peptide molecule.

[0163] In solution phase synthesis, a wide variety of coupling methods and protecting groups may be used (see Gross and Meienhofer, eds., “The Peptides: Analysis, Synthesis, Biology,” Vol. 1-4 (Academic Press, 1979); Bodansky and Bodansky, “The Practice of Peptide Synthesis,” 2d ed. (Springer Verlag, 1994)). In addition, intermediate purification and linear scale up are possible. Those of ordinary skill in the art will appreciate that solution synthesis requires consideration of main chain and side chain protecting groups and activation method. In addition, careful segment selection is necessary to minimize racemization during segment condensation. Solubility considerations are also a factor.

[0164] Solid phase peptide synthesis uses an insoluble polymer for support during organic synthesis. The polymer-supported peptide chain permits the use of simple washing and filtration steps instead of laborious purifications at intermediate steps. Solid-phase peptide synthesis may generally be performed according to the method of Merrifield et al., J. Am. Chem. Soc. 85:2149, 1963, which involves assembling a linear peptide chain on a resin support using protected amino acids. Solid phase peptide synthesis typically utilizes either the Boc or Fmoc strategy. The Boc strategy uses a 1% cross-linked polystyrene resin. The standard protecting group for α-amino functions is the tert-butyloxycarbonyl (Boc) group. This group can be removed with dilute solutions of strong acids such as 25% trifluoroacetic acid (TFA). The next Boc-amino acid is typically coupled to the amino acyl resin using dicyclohexylcarbodiimide (DCC). Following completion of the assembly, the peptide-resin is treated with anhydrous HF to cleave the benzyl ester link and liberate the free peptide. Side-chain functional groups are usually blocked during synthesis by benzyl-derived blocking groups, which are also cleaved by HF. The free peptide is then extracted from the resin with a suitable solvent, purified and characterized. Newly synthesized peptides can be purified, for example, by gel filtration, HPLC, partition chromatography and/or ion-exchange chromatography, and may be characterized by, for example, mass spectrometry or amino acid sequence analysis. In the Boc strategy, C-terminal amidated peptides can be obtained using benzhydrylamine or methylbenzhydrylamine resins, which yield peptide amides directly upon cleavage with HF.

[0165] In the procedures discussed above, the selectivity of the side-chain blocking groups and of the peptide-resin link depends upon the differences in the rate of acidolytic cleavage. Orthoganol systems have been introduced in which the side-chain blocking groups and the peptide-resin link are completely stable to the reagent used to remove the α-protecting group at each step of the synthesis. The most common of these methods involves the 9-fluorenylmethyloxycarbonyl (Fmoc) approach. Within this method, the side-chain protecting groups and the peptide-resin link are completely stable to the secondary amines used for cleaving the N-α-Fmoc group. The side-chain protection and the peptide-resin link are cleaved by mild acidolysis. The repeated contact with base makes the Merrifield resin unsuitable for Fmoc chemistry, and p-alkoxybenzyl esters linked to the resin are generally used. Deprotection and cleavage are generally accomplished using TFA.

[0166] Those of ordinary skill in the art will recognize that, in solid phase synthesis, deprotection and coupling reactions must go to completion and the side-chain blocking groups must be stable throughout the entire synthesis. In addition, solid phase synthesis is generally most suitable when peptides are to be made on a small scale.

[0167] Acetylation of the N-terminus can be accomplished by reacting the final peptide with acetic anhydride before cleavage from the resin. C-amidation is accomplished using an appropriate resin such as methylbenzhydrylamine resin using the Boc technology.

[0168] Following synthesis of a linear peptide, with or without N-acetylation and/or C-amidation, cyclization may be achieved if desired by any of a variety of techniques well known in the art. Within one embodiment, a bond may be generated between reactive amino acid side chains. For example, a disulfide bridge may be formed from a linear peptide comprising two thiol-containing residues by oxidizing the peptide using any of a variety of methods. Within one such method, air oxidation of thiols can generate disulfide linkages over a period of several days using either basic or neutral aqueous media. The peptide is used in high dilution to minimize aggregation and intermolecular side reactions. This method suffers from the disadvantage of being slow but has the advantage of only producing H₂O as a side product. Alternatively, strong oxidizing agents such as I₂ and K₃Fe(CN)₆ can be used to form disulfide linkages. Those of ordinary skill in the art will recognize that care must be taken not to oxidize the sensitive side chains of Met, Tyr, Trp or His. Cyclic peptides produced by this method require purification using standard techniques, but this oxidation is applicable at acid pHs. Oxidizing agents also allow concurrent deprotection/oxidation of suitable S-protected linear precursors to avoid premature, nonspecific oxidation of free cysteine.

[0169] DMSO, unlike I₂ and K₃Fe(CN)₆, is a mild oxidizing agent which does not cause oxidative side reactions of the nucleophilic amino acids mentioned above. DMSO is miscible with H₂O at all concentrations, and oxidations can be performed at acidic to neutral pHs with harmless byproducts. Methyltrichlorosilane-diphenylsulfoxide may alternatively be used as an oxidizing agent, for concurrent deprotection/oxidation of S-Acm, S-Tacm or S-t-Bu of cysteine without affecting other nucleophilic amino acids. There are no polymeric products resulting from intermolecular disulfide bond formation. Suitable thiol-containing residues for use in such oxidation methods include, but are not limited to, cysteine, β,β-dimethyl cysteine (penicillamine or Pen), β,β-tetramethylene cysteine (Tmc), β,β-pentamethylene cysteine (Pmc), β-mercaptopropionic acid (Mpr), β,β-pentamethylene-β-mercaptopropionic acid (Pmp), 2-mercaptobenzene, 2-mercaptoaniline and 2-mercaptoproline. Peptides containing such residues are illustrated by the following representative formulas, in which the nonclassical cadherin is OB-cadherin, the underlined portion is cyclized, N-acetyl groups are indicated by N-Ac and C-terminal amide groups are represented by —NH₂:

(SED ID NO:669)

| | |
|---|---|
| i) | N-Ac-Cys-Asp-Asp-Lys-Cys-NH₂ |

(SED ID NO:676)

| | |
|---|---|
| ii) | N-Ac-Cys-Ile-Asp-Asp-Lys-Ser-Gly-Cys-NH₂ |

(SED ID NO:670)

| | |
|---|---|
| iii) | N-Ac-Cys-Ile-Asp-Asp-Lys-Cys-NH₂ |

(SED ID NO:671)

| | |
|---|---|
| iv) | N-Ac-Cys-Asp-Asp-Lys-Ser-Cys-NH₂ |

(SED ID NO:673)

| | |
|---|---|
| v) | N-Ac-Cys-IIe-Asp-Asp-Lys-Ser-Cys-NH₂ |

(SED ID NO:671)

| | |
|---|---|
| vi) | N-Ac-Cys-Asp-Asp-Lys-Ser-Cys-OH |

(SED ID NO:673)

| | |
|---|---|
| vii) | H-Cys-Ile-Asp-Asp-Lys-Ser-Cys-NH₂ |

(SED ID NO:71)

| | |
|---|---|
| viii) | N-Ac-Cys-Asp-Asp-Lys-Pen-NH₂ |

(SED ID NO:680)

| | |
|---|---|
| ix) | N-Ac-Cys-Phe-Val-Ile-Asp-Asp-Lys-Ser-Gly- |
| | Cys-NH₂ |

(SED ID NO:683)

| | |
|---|---|
| x) | N-Ac-Cys-Ile-Phe-Val-Ile-Asp-Asp-Lys-Ser- |
| | Gly-Cys-NH₂ |

(SED ID NO:53)

| | |
|---|---|
| xi) | N-Ac-Ile-Tmc-Val-Ile-Asp-Asp-Lys-Ser-Cys- |
| | Glu-NH₂ |

(SED ID NO:54)

| | |
|---|---|
| xii) | N-Ac-Ile-Pmc-Val-Ile-Asp-Asp-Lys-Ser-Gly- |
| | Cys-NH₂ |

(SED ID NO:55)

| | |
|---|---|
| xiii) | Mpr-Val-Ile-Asp-Asp-Lys-Ser-Gly-Cys-NH₂ |

(SED ID NO:56)

| | |
|---|---|
| xiv) | Pmp-Val-Ile-Asp-Asp-Lys-Ser-Gly-Cys-NH₂ |

[chemical structure]

[0171] It will be readily apparent to those of ordinary skill in the art that, within each of these representative formulas, any of the above thiol-containing residues may be employed in place of one or both of the thiol-containing residues recited. Similar formulas comprising different nonclassical cadherin CAR sequences may be generated by those of ordinary skill in the art, based on the CAR sequences provided herein.

[0172] Within another embodiment, cyclization may be achieved by amide bond formation. For example, a peptide bond may be formed between terminal functional groups (i.e., the amino and carboxy termini of a linear peptide prior to cyclization). One such cyclic peptide comprising an OB-cadherin CAR sequence is IDDKSG (SEQ ID NO:717) with or without an N-terminal acetyl group and/or a C-terminal amide. Within another such embodiment, the linear peptide comprises a D-amino acid (e.g., DDKsS; SEQ ID NO:57). Alternatively, cyclization may be accomplished by linking one terminus and a residue side chain or using two side chains, as in KDDKD (SEQ ID NO:697) or KIDDKSGD (SEQ ID NO:704), with or without an N-terminal acetyl group and/or a C-terminal amide. Residues capable of forming a lactam bond include lysine, ornithine (Orn), α-amino adipic acid, m-aminomethylbenzoic acid, α,β-diaminopropionic acid, glutamate or aspartate.

[0173] Methods for forming amide bonds are well known in the art and are based on well established principles of chemical reactivity. Within one such method, carbodiimide-mediated lactam formation can be accomplished by reaction of the carboxylic acid with DCC, DIC, EDAC or DCCI, resulting in the formation of an O-acylurea that can be reacted immediately with the free amino group to complete the cyclization. The formation of the inactive N-acylurea, resulting from O→N migration, can be circumvented by converting the O-acylurea to an active ester by reaction with an N-hydroxy compound such as 1-hydroxybenzotriazole, 1-hydroxysuccinimide, 1-hydroxynorbornene carboxamide or ethyl 2-hydroximino-2-cyanoacetate. In addition to minimizing O→N migration, these additives also serve as catalysts during cyclization and assist in lowering racemization. Alternatively, cyclization can be performed using the azide method, in which a reactive azide intermediate is generated from an alkyl ester via a hydrazide. Hydrazinolysis of the terminal ester necessitates the use of a t-butyl group for the protection of side chain carboxyl functions in the acylating component. This limitation can be overcome by using diphenylphosphoryl acid (DPPA), which furnishes an azide directly upon reaction with a carboxyl group. The slow reactivity of azides and the formation of isocyanates by their disproportionation restrict the usefulness of this method. The mixed anhydride method of lactam formation is widely used because of the facile removal of reaction by-products. The anhydride is formed upon reaction of the carboxylate anion with an alkyl chloroformate or pivaloyl chloride. The attack of the amino component is then guided to the carbonyl carbon of the acylating component by the electron donating effect of the alkoxy group or by the steric bulk of the pivaloyl chloride t-butyl group, which obstructs attack on the wrong carbonyl group. Mixed anhydrides with phosphoric acid derivatives have also been successfully used. Alternatively, cyclization can be accomplished using activated esters. The presence of electron withdrawing substituents on the alkoxy carbon of esters increases their susceptibility to aminolysis. The high reactivity of esters of p-nitrophenol, N-hydroxy compounds and polyhalogenated phenols has made these “active esters” useful in the synthesis of amide bonds. The last few years have witnessed the development of benzotriazolyloxytris-(dimethylamino)phosphonium hexafluorophosphonate (BOP) and its congeners as advantageous coupling reagents. Their performance is generally superior to that of the well established carbodiimide amide bond formation reactions.

[0174] Within a further embodiment, a thioether linkage may be formed between the side chain of a thiol-containing residue and an appropriately derivatized α-amino acid. By way of example, a lysine side chain can be coupled to bromoacetic acid through the carbodiimide coupling method (DCC, EDAC) and then reacted with the side chain of any of the thiol containing residues mentioned above to form a thioether linkage. In order to form dithioethers, any two thiol containing side-chains can be reacted with dibromoethane and diisopropylamine in DMF. Examples of thiol-containing linkages are shown below:

[chemical structure]

[0175] Cyclization may also be achieved using δ₁,δ₁-Ditryptophan (i.e., Ac-Trp-Gly-Gly-Trp-OMe) (SEQ ID NO:58), as shown below:

[chemical structure]

[0176] Representative structures of cyclic peptides comprising OB-cadherin CAR sequences are provided in FIGS. 4A-4C. The structures and formulas recited herein are provided solely for the purpose of illustration, and are not intended to limit the scope of the cyclic peptides described herein.

[0177] For longer modulating agents, recombinant methods are preferred for synthesis. Within such methods, all or part of a modulating agent can be synthesized in living cells, using any of a variety of expression vectors known to those of ordinary skill in the art to be appropriate for the particular host cell. Suitable host cells may include bacteria, yeast cells, mammalian cells, insect cells, plant cells, algae and other animal cells (e.g., hybridoma, CHO, myeloma). The DNA sequences expressed in this manner may encode portions of a nonclassical cadherin or other adhesion molecule, or may encode a peptide comprising a nonclassical cadherin analogue or an antibody fragment that specifically binds to a nonclassical cadherin CAR sequence. Such DNA sequences may be prepared based on known cDNA or genomic sequences, or from sequences isolated by screening an appropriate library with probes designed based on the sequences of known nonclassical cadherins. Such screens may generally be performed as described in Sambrook et al., Molecular Cloning. A Laboratory Manual, Cold Spring Harbor Laboratories, Cold Spring Harbor, N.Y., 1989 (and references cited therein). Polymerase chain reaction (PCR) may also be employed, using oligonucleotide primers in methods well known in the art, to isolate nucleic acid molecules encoding all or a portion of an endogenous adhesion molecule. To generate a nucleic acid molecule encoding a desired modulating agent, an endogenous cadherin sequence may be modified using well known techniques. For example, portions encoding one or more CAR sequences may be joined, with or without separation by nucleic acid regions encoding linkers, as discussed above. Alternatively, portions of the desired nucleic acid sequences may be synthesized using well known techniques, and then ligated together to form a sequence encoding the modulating agent.

[0178] As noted above, polynucleotides may also function as modulating agents. In general, such polynucleotides should be formulated to permit expression of a polypeptide modulating agent following administration to a mammal. Such formulations are particularly useful for therapeutic purposes, as described below. Those of ordinary skill in the art will appreciate that there are many ways to achieve expression of a polynucleotide within a mammal, and any suitable method may be employed. For example, a polynucleotide may be incorporated into a viral vector such as, but not limited to, adenovirus, adeno-associated virus, retrovirus, or vaccinia or other pox virus (e.g., avian pox virus). Techniques for incorporating DNA into such vectors are well known to those of ordinary skill in the art. A retroviral vector may additionally transfer or incorporate a gene for a selectable marker (to aid in the identification or selection of transfected cells) and/or a targeting moiety, such as a gene that encodes a ligand for a receptor on a specific target cell, to render the vector target specific. Targeting may also be accomplished using an antibody, by methods known to those of ordinary skill in the art. Other formulations for polynucleotides for therapeutic purposes include colloidal dispersion systems, such as macromolecule complexes, nanocapsules, microspheres, beads, and lipid-based systems including oil-in-water emulsions, micelles, mixed micelles, and liposomes. A preferred colloidal system for use as a delivery vehicle in vitro and in vivo is a liposome (i.e., an artificial membrane vesicle). The preparation and use of such systems is well known in the art.

[0179] As noted above, a modulating agent may additionally, or alternatively, comprise a substance such as an antibody or antigen-binding fragment thereof, that specifically binds to a nonclassical cadherin CAR sequence. As used herein, a substance is said to “specifically bind” to a nonclassical cadherin CAR sequence (with or without flanking amino acids) if it reacts at a detectable level with a peptide containing that sequence, and does not react detectably with peptides containing a different CAR sequence or a sequence in which the order of amino acid residues in the cadherin CAR sequence and/or flanking sequence is altered. Such antibody binding properties may generally be assessed using an ELISA, which may be readily performed by those of ordinary skill in the art and is described, for example, by Newton et al., Develop. Dynamics 197:1-13, 1993.

[0180] Polyclonal and monoclonal antibodies may be raised against a nonclassical cadherin CAR sequence using conventional techniques. See, e.g., Harlow and Lane, Antibodies: A Laboratory Manual, Cold Spring Harbor Laboratory, 1988. In one such technique, an immunogen comprising the CAR sequence is initially injected into any of a wide variety of mammals (e.g., mice, rats, rabbits, sheep or goats). The smaller immunogens (i.e., less than about 20 amino acids) should be joined to a carrier protein, such as bovine serum albumin or keyhole limpet hemocyanin. Following one or more injections, the animals are bled periodically. Polyclonal antibodies specific for the CAR sequence may then be purified from such antisera by, for example, affinity chromatography using the modulating agent or antigenic portion thereof coupled to a suitable solid support.

[0181] Monoclonal antibodies specific for a nonclassical cadherin sequence may be prepared, for example, using the technique of Kohler and Milstein, Eur. J. Immunol. 6:511-519, 1976, and improvements thereto. Briefly, these methods involve the preparation of immortal cell lines capable of producing antibodies having the desired specificity from spleen cells obtained from an animal immunized as described above. The spleen cells are immortalized by, for example, fusion with a myeloma cell fusion partner, preferably one that is syngeneic with the immunized animal. Single colonies are selected and their culture supernatants tested for binding activity against the modulating agent or antigenic portion thereof. Hybridomas having high reactivity and specificity are preferred.

[0182] Monoclonal antibodies may be isolated from the supernatants of growing hybridoma colonies, with or without the use of various techniques known in the art to enhance the yield. Contaminants may be removed from the antibodies by conventional techniques, such as chromatography, gel filtration, precipitation and extraction. Antibodies having the desired activity may generally be identified using immunofluorescence analyses of tissue sections, cell or other samples where the target cadherin is localized.

[0183] Within certain embodiments, the use of antigen-binding fragments of antibodies may be preferred. Such fragments include Fab fragments, which may be prepared using standard techniques. Briefly, immunoglobulins may be purified from rabbit serum by affinity chromatography on Protein A bead columns (Harlow and Lane, Antibodies: A Laboratory Manual, Cold Spring Harbor Laboratory, 1988; see especially page 309) and digested by papain to yield Fab and Fc fragments. The Fab and Fc fragments may be separated by affinity chromatography on protein A bead columns (Harlow and Lane, 1988, pages 628-29).

Evaluation of Modulating Agent Activity

[0184] Modulating agents as described above are capable of modulating one or more nonclassical cadherin-mediated functions. An initial screen for such activity may be performed by evaluating the ability of a modulating agent to bind to a nonclassical cadherin using any binding assay known to those of ordinary skill in the art. For example, a Pharmacia Biosensor machine may be used, as discussed in Jonsson et al., Biotechniques 11:520-27, 1991. For example, a modulating agent may comprise a CAR sequence that binds to a nonclassical cadherin. A specific example of a technology that measures the interaction of peptides with molecules can be found in Williams et al., J. Biol. Chem. 272, 22349-22354, 1997. Alternatively, real-time BIA (Biomolecular Interaction Analysis) uses the optical phenomenon surface plasmon resonance to monitor biomolecular interactions. The detection depends upon changes in the mass concentration of macromolecules at the biospecific interface, which in turn depends upon the immobilization of test molecule or peptide (referred to as the ligand) to the surface of a Biosensor chip, followed by binding of the interacting molecule (referred to as the analyte) to the ligand. Binding to the chip is measured in real-time in arbitrary units of resonance (RU).

[0185] By way of example, surface plasmon resonance experiments may be carried out using a BIAcore X™ Biosensor (Pharmacia Ltd., BIAcore, Uppsala, Sweden). Parallel flow cells of CM 5 sensor chips may be derivatized, using the amine coupling method, with streptavidin (200 μg/ml) in 10 mM Sodium Acetate, pH 4.0, according to the manufacturer's protocol. Approximately 2100-2600 resonance units (RU) of ligand may be immobilized, corresponding to a concentration of about 2.1-2.6 ng/mm². The chips may then coated be with nonclassical cadherin derivatized to biotin. Any non-specifically bound protein is removed.

[0186] To determine binding, test analytes (e.g., peptides containing the nonclassical cadherin CAR sequence) may be placed in running buffer and passed simultaneously over test and control flow cells. After a period of free buffer flow, any analyte remaining bound to the surface may be removed with, for example, a pulse of 0.1% SDS bringing the signal back to baseline. Specific binding to the derivatized sensor chips may be determined automatically by the system by subtraction of test from control flow cell responses. In general, a modulating agent binds to a nonclassical cadherin at a detectable level within such as assay. The level of binding is preferably at least that observed for the full length nonclassical cadherin under similar conditions.

[0187] The ability to modulate a nonclassical cadherin-mediated function may be evaluated using any of a variety of in vitro assays designed to measure the effect of the peptide on a response that is generally mediated by the nonclassical cadherin. As noted above, modulating agents may be capable of enhancing or inhibiting a nonclassical cadherin-mediated function.

[0188] Certain nonclassical cadherins are associated with adhesion of particular cell types (e.g., cancer cells). The ability of an agent to modulate cell adhesion may generally be evaluated in vitro by assaying the effect on adhesion between appropriate cells. In general, a modulating agent is an inhibitor of cell adhesion if contact of the test cells with the modulating agent results in a discernible disruption of cell adhesion. Modulating agents that enhance cell adhesion (e.g., agents comprising multiple nonclassical cadherin CAR sequences and/or nonclassical cadherin CAR sequences linked to a support material) are considered to be modulators of cell adhesion if they are capable of promoting cell adhesion, as judged by plating assays to assess cell adhesion to a modulating agent attached to a support material, such as tissue culture plastic.

[0189] Within certain cell adhesion assays, the addition of a modulating agent to cells that express a nonclassical cadherin results in disruption of cell adhesion. A “nonclassical cadherin-expressing cell,” as used herein, may be any type of cell that expresses a nonclassical cadherin at a detectable level, using standard techniques such as immunocytochemical protocols (e.g., Blaschuk and Farookhi, Dev. Biol. 136:564-567, 1989). For example, such cells may be plated under standard conditions that, in the absence of modulating agent, permit cell adhesion. In the presence of modulating agent (e.g., 1 mg/mL), disruption of cell adhesion may be determined visually within 24 hours, by observing retraction of the cells from one another and the substratum.

[0190] Suitable cells for use within such assays may be any of a variety of cells that express the nonclassical cadherin of interest. Certain cells express one or more cadherins endogenously. For example, OB-cadherin-expressing cells include stromal, osteoblast and/or cancer cells. Cadherin-5 is expressed by endothelial cells, and cadherin-6 expression is associated with, for example, kidney tumor cells. Accordingly, such cell types may be used to assess the effect of modulating agents directed against OB-cadherin or cadherin-5 CAR sequences. In general, MDCK cells or keratinocytes may be used to evaluate desmocollin- or desmoglein-mediated cell adhesion. Neural cells may be used to evaluate protocadherin, cnr, PB-cadherin and type II cadherin function. It will be apparent that other cells may also be used within such assays, provided that the cells express the nonclassical cadherin of interest.

[0191] Alternatively, cells that do not naturally express a cadherin may be used within such assays. Such cells may be stably transfected with a polynucleotide (e.g., a cDNA) encoding a cadherin of interest, such that the cadherin is expressed on the surface of the cell. Expression of the cadherin may be confirmed by assessing adhesion of the transfected cells, in conjunction with immunocytochemical techniques using antibodies directed against the cadherin of interest. The stably transfected cells that aggregate, as judged by light microscopy, following transfection express sufficient levels of the nonclassical cadherin. Preferred cells for use in such assays include L cells, which do not detectably adhere and do not express any cadherin (Nagafuchi et al., Nature 329:341-343, 1987). Following transfection of L cells with a cDNA encoding a cadherin, aggregation is observed. Modulating agents that detectably inhibit such aggregation may be used to modulate functions mediated by the nonclassical cadherin. Such assays have been used for numerous nonclassical cadherins, including OB-cadherin (Okazaki et al., J. Biol. Chem. 269:12092-98, 1994), cadherin-5 (Breier et al., Blood 87:630-641, 1996), cadherin-6 (Mbalaviele et al., J. Cell. Biol. 141:1467-1476, 1998), cadherin-8 (Kido et al., Genomics 48:186-194, 1998), cadherin-15 (Shimoyama et al., J. Biol. Chem. 273:10011-10018, 1998), PB-cadherin (Sugimoto et al., J. Biol. Chem. 271:11548-11556, 1996), LI-cadherin (Kreft et al., J. Cell. Biol. 136:1109-1121, 1997), protocadherin 42 and 43 (Sano et al., EMBO J. 12:2249-2256, 1993) and desmosomal cadherins (Marcozzi et al., J. Cell. Sci. 111:495-509, 1998). It will be apparent to those of ordinary skill in the art that assays may be performed in a similar manner for other nonclassical cadherins.

[0192] Transfection of cells for use in cell adhesion assays may be performed using standard techniques and published cadherin sequences. For example, sequences of nonclassical cadherins may be found within references cited herein and in the GenBank database. GenBank accession numbers for certain nonclassical cadherins include: X59796 (human cadherin-5); D31784 (human cadherin-6); D42150 (chicken cadherin-7); L34060 (human cadherin-8); L34056 (human OB cadherin); L34057 (human cadherin-12); U59325 (human cadherin-14); D83542 (human cadherin-15); D83348 and D88349 (rat PB-cadherin); X83228 (human LI-cadherin); L34058 (human T cadherin); L11373 (human protocadherin 43); AF029343 (human protocadherin 68); X56654 (human desmoglein 1); Z26317 and S64273 (human desmoglein 2); X72925 (human desmocollin 1); X56807 (human desmocollin 2); X83929 (human desmocollin 3); D17427 (human desmocollin 4); D86916 (mouse cadherin-related neuronal receptor 1); D86917 (mouse cadherin-related neuronal receptor 2); AB008178 (mouse cadherin-related neuronal receptor 3); AB008180 (mouse cadherin-related neuronal receptor 5); AB008181 (mouse cadherin-related neuronal receptor 6); AB008182 (mouse cadherin-related neuronal receptor 7); AB008183 (mouse cadherin-related neuronal receptor 8).

[0193] By way of example, an assay for evaluating a modulating agent for the ability to inhibit an OB-cadherin mediated function may employ MDA-231 human breast cancer cells. According to a representative procedure, the cells may be plated at 10-20,000 cells per 35 mm tissue culture flasks containing DMEM with 5% FCS and sub-cultured periodically (Sommers et al., Cell Growth Diffn 2:365-72, 1991). Cells may be harvested and replated in 35 mm tissue culture flasks containing 1 mm coverslips and incubated until 50-65% confluent (24-36 hours). At this time, coverslips may be transferred to a 24-well plate, washed once with fresh DMEM and exposed to modulating agent at a concentration of, for example, 1 mg/mL for 24 hours. Fresh modulating agent may then be added, and the cells left for an additional 24 hours. Cells may be fixed with 2% paraformaldehyde for 30 minutes and then washed three times with PBS. Coverslips can be mounted and viewed by phase contrast microscopy.

[0194] In the absence of modulating agent, MDA-231 cells display an epithelial-like morphology and are well attached to the substratum. MDA-231 cells that are treated with a modulating agent that disrupts OB-cadherin mediated cell adhesion may assume a round shape and become loosely attached to the substratum within 48 hours of treatment with 1 mg/mL of modulating agent.

[0195] It will be apparent that similar assays may be performed to assess a modulating agent for the ability to inhibit cell adhesion mediated by other nonclassical cadherins, using cells appropriate for the nonclassical cadherin of interest. In general, a modulating agent that is derived from a particular nonclassical cadherin CAR sequence (i.e., comprises such a CAR sequence, or an analog or mimetic thereof, or an antibody that specifically recognizes such a CAR sequence) and that modulates adhesion of a cell that expresses the same nonclassical cadherin is considered to modulate a function mediated by the nonclassical cadherin.

[0196] Other assays may be used to assess the effect of a modulating agent on specific nonclassical cadherin-mediated functions. For example, modulating agents that inhibit interactions of certain nonclassical cadherins (e.g., OB-cadherin, cadherin-5, desmogleins and desmocollins) may enhance skin permeability. This ability may be assessed by evaluating, for example, the effect of a modulating agent on permeability of adherent epithelial and/or endothelial cell layers (e.g., human skin). Such skin may be derived from a natural source or may be synthetic. Human abdominal skin for use in such assays may generally be obtained from humans at autopsy within 24 hours of death. Briefly, a modulating agent (e.g., 500 μg/ml) and a test marker (e.g., the fluorescent markers Oregon Green™ and Rhodamine Green™ Dextran) may be dissolved in a sterile buffer (e.g., phosphate buffer, pH 7.2), and the ability of the marker to penetrate through the skin and into a receptor fluid (e.g., phosphate buffer) may be measured using a Franz Cell apparatus (Franz, Curr. Prob. Dermatol. 7:58-68, 1978; Franz, J. Invest. Dermatol. 64:190-195, 1975). The penetration of the markers through the skin may be assessed at, for example, 6, 12, 24, 36, and 48 hours after the start of the experiment. In general, a modulating agent that enhances the permeability of human skin results in a statistically significant increase in the amount of marker in the receptor compartment after 6-48 hours in the presence of 500 μg/mL modulating agent.

[0197] By way of another example, an illustrative assay for evaluating a modulating agent for the ability to inhibit a desmosomal cadherin mediated function may evaluate the effect of a modulating agent on the electrical resistance across a monolayer of cells. For example, Madin Darby canine kidney (MDCK) cells can be exposed to the modulating agent dissolved in medium (e.g., at a final concentration of 0.5 mg/ml for a period of 24 hours). The effect on electrical resistance can be measured using standard techniques. This assay evaluates the effect of a modulating agent on tight junction formation in epithelial cells. In general, the presence of 500 μg/mL modulating agent should result in a statistically significant decrease in electrical resistance after 24 hours.

[0198] Certain other nonclassical cadherins (e.g., cadherin-7, cadherin-8, cadherin-12, cadherin-14, cadherin-15, T-cadherin, PB-cadherin, protocadherins and cnrs) may be involved in mediating neurite growth. Agents that modulate such a function may be evaluated using a neurite outgrowth assay. Within one such assay, neurons may be cultured on a monolayer of cells (e.g., 3T3 cells) that express a nonclassical cadherin. Neurons grown on such cells (under suitable conditions and for a sufficient period of time) extend neurites that are typically, on average, twice as long as neurites extended from neurons cultured on 3T3 cells that do not express the nonclassical cadherin. Briefly, monolayers of control 3T3 fibroblasts and 3T3 fibroblasts that express a nonclassical cadherin may be established by overnight culture of 80,000 cells in individual wells of an 8-chamber well tissue culture slide. 3000 cerebellar neurons isolated from post-natal day 3 mouse brains may be cultured for 18 hours on the various monolayers in control media (SATO/2% FCS), or media supplemented with various concentrations of the modulating agent or control peptide. The cultures may then be fixed and stained for GAP43 which specifically binds to the neurons and their neurites. The length of the longest neurite on each GAP43 positive neuron may be measured by computer assisted morphometry.

[0199] A modulating agent may inhibit or enhance such neurite outgrowth. Under the conditions described above, the presence of 500 μg/mL of a modulating agent that disrupts neural cell adhesion should result in a decrease in the mean neurite length by at least 50%, relative to the length in the absence of modulating agent or in the presence of a negative control peptide. Alternatively, the presence of 500 μg/mL of a modulating agent that enhances neural cell adhesion should result in an increase in the mean neurite length by at least 50%.

[0200] Transfection of cells for use in a neurite outgrowth assay may be performed using standard techniques and published cadherin sequences. For example, sequences of nonclassical cadherins may be found within references cited herein and in the GenBank database. GenBank accession numbers for these cadherins are recited above.

[0201] Certain modulating agents (e.g., peptides that contain VE-cadherin and/or OB-cadherin CAR sequences, or analogues or mimetics thereof) may inhibit angiogenesis. The effect of a particular modulating agent on angiogenesis may generally be determined by evaluating the effect of the agent on blood vessel formation. Such a determination may generally be performed, for example, using a chick chorioallantoic membrane assay (Iruela-Arispe et al., Molecular Biology of the Cell 6:327-343, 1995). Briefly, a modulating agent may be embedded in a mesh composed of vitrogen at one or more concentrations (e.g., ranging from about 1 to 100 μg/mesh). The mesh(es) may then be applied to chick chorioallantoic membranes. After 24 hours, the effect of the modulating agent may be determined using computer assisted morphometric analysis. A modulating agent should inhibit angiogenesis by at least 25% at a concentration of 33 μg/mesh.

[0202] A myoblast fusion assay may be used as a functional assay for agents that modulate cadherin-15 function. Cadherin-15 has been shown to mediate the fusion of muscle cells into mature muscle fibers in vitro. Briefly, to perform such an assay, myoblasts may be grown in a dish, differentiation is induced, and modulating agent is added. The effect on fusion is then evaluated. In general, a modulating agent that inhibits cadherin-15 function results in a statistically significant decrease in myoblast fusion in the presence of 1 mg/mL modulating agent. Such assays may be performed as described by Pouliot et al., Dev. Biol. 141:292-298, 1990.

Modulating Agent Modification and Formulations

[0203] A modulating agent as described herein may, but need not, be linked to one or more additional molecules. In particular, as discussed below, it may be beneficial for certain applications to link multiple modulating agents (which may, but need not, be identical) to a support material, such as a single molecule (e.g., keyhole limpet hemocyanin) or a solid support, such as a polymeric matrix (which may be formulated as a membrane or microstructure, such as an ultra thin film), a container surface (e.g., the surface of a tissue culture plate or the interior surface of a bioreactor), or a bead or other particle, which may be prepared from a variety of materials including glass, plastic or ceramics. For certain applications, biodegradable support materials are preferred, such as cellulose and derivatives thereof, collagen, spider silk or any of a variety of polyesters (e.g., those derived from hydroxy acids and/or lactones) or sutures (see U.S. Pat. No. 5,245,012). Within certain embodiments, modulating agents and molecules comprising other CAR sequence(s) (e.g., an HAV or RGD sequence) may be attached to a support such as a polymeric matrix, preferably in an alternating pattern.

[0204] Suitable methods for linking a modulating agent to a support material will depend upon the composition of the support and the intended use, and will be readily apparent to those of ordinary skill in the art. Attachment may generally be achieved through noncovalent association, such as adsorption or affinity or, preferably, via covalent attachment (which may be a direct linkage between a modulating agent and functional groups on the support, or may be a linkage by way of a cross-linking agent). Attachment of a modulating agent by adsorption may be achieved by contact, in a suitable buffer, with a solid support for a suitable amount of time. The contact time varies with temperature, but is generally between about 5 seconds and 1 day, and typically between about 10 seconds and 1 hour.

[0205] Covalent attachment of a modulating agent to a molecule or solid support may generally be achieved by first reacting the support material with a bifunctional reagent that will also react with a functional group, such as a hydroxyl or amino group, on the modulating agent. For example, a modulating agent may be bound to an appropriate polymeric support or coating using benzoquinone, by condensation of an aldehyde group on the support with an amine and an active hydrogen on the modulating agent or by condensation of an amino group on the support with a carboxylic acid on the modulating agent. A preferred method of generating a linkage is via amino groups using glutaraldehyde. A modulating agent may be linked to cellulose via ester linkages. Similarly, amide linkages may be suitable for linkage to other molecules such as keyhole limpet hemocyanin or other support materials. Multiple modulating agents and/or molecules comprising other CAR sequences may be attached, for example, by random coupling, in which equimolar amounts of such molecules are mixed with a matrix support and allowed to couple at random.

[0206] Although modulating agents as described herein may preferentially bind to specific tissues or cells, and thus may be sufficient to target a desired site in vivo, it may be beneficial for certain applications to include an additional targeting agent. Accordingly, a targeting agent may also, or alternatively, be linked to a modulating agent to facilitate targeting to one or more specific tissues. As used herein, a “targeting agent,” may be any substance (such as a compound or cell) that, when linked to a modulating agent enhances the transport of the modulating agent to a target tissue, thereby increasing the local concentration of the modulating agent. Targeting agents include antibodies or fragments thereof, receptors, ligands and other molecules that bind to cells of, or in the vicinity of, the target tissue. Known targeting agents include serum hormones, antibodies against cell surface antigens, lectins, adhesion molecules, tumor cell surface binding ligands, steroids, cholesterol, lymphokines, fibrinolytic enzymes and those drugs and proteins that bind to a desired target site. Among the many monoclonal antibodies that may serve as targeting agents are anti-TAC, or other interleukin-2 receptor antibodies; 9.2.27 and NR-ML-05, reactive with the 250 kilodalton human melanoma-associated proteoglycan; and NR-LU-10, reactive with a pancarcinoma glycoprotein. An antibody targeting agent may be an intact (whole) molecule, a fragment thereof, or a functional equivalent thereof. Examples of antibody fragments are F(ab′)2, Fab′, Fab and F[v] fragments, which may be produced by conventional methods or by genetic or protein engineering. Linkage is generally covalent and may be achieved by, for example, direct condensation or other reactions, or by way of bi- or multi-functional linkers.

[0207] For certain embodiments, it may be beneficial to also, or alternatively, link a drug to a modulating agent. As used herein, the term “drug” refers to any bioactive agent intended for administration to a mammal to prevent or treat a disease or other undesirable condition. Drugs include hormones, growth factors, proteins, peptides and other compounds. The use of certain specific drugs within the context of the present invention is discussed below.

[0208] Modulating agents as described herein may be present within a pharmaceutical composition. A pharmaceutical composition comprises one or more modulating agents in combination with one or more pharmaceutically or physiologically acceptable carriers, diluents or excipients. Such compositions may comprise buffers (e.g., neutral buffered saline or phosphate buffered saline), carbohydrates (e.g., glucose, mannose, sucrose or dextrans), mannitol, proteins, polypeptides or amino acids such as glycine, antioxidants, chelating agents such as EDTA or glutathione, adjuvants (e.g., aluminum hydroxide) and/or preservatives. Within yet other embodiments, compositions of the present invention may be formulated as a lyophilizate. One or more modulating agents (alone or in combination with a targeting agent and/or drug) may, but need not, be encapsulated within liposomes using well known technology. Compositions of the present invention may be formulated for any appropriate manner of administration, including for example, topical, oral, nasal, intravenous, intracranial, intraperitoneal, subcutaneous, or intramuscular administration.

[0209] For certain embodiments, as discussed below, a pharmaceutical composition may further comprise a modulator of cell adhesion that is mediated by one or more molecules other than the particular nonclassical cadherin. Such modulators may generally be prepared as described above, using one or more CAR sequences and/or antibodies thereto. Such compositions are particularly useful for situations in which it is desirable to inhibit cell adhesion mediated by multiple cell adhesion molecules, such as other members of the cadherin gene superfamily such as the classical cadherins (e.g., N-cadherin and E-cadherin); integrins; occludin; claudins; N-CAM and/or extracellular matrix proteins such as laminin, fibronectin, collagens, vitronectin, entactin and tenascin.

[0210] A pharmaceutical composition may also, or alternatively, contain one or more drugs, which may be linked to a modulating agent or may be free within the composition. Virtually any drug may be administered in combination with a modulating agent as described herein, for a variety of purposes as described below. Examples of types of drugs that may be administered with a modulating agent include analgesics, anesthetics, antianginals, antifungals, antibiotics, anticancer drugs (e.g., taxol or mitomycin C), antiinflammatories (e.g., ibuprofen and indomethacin), anthelmintics, antidepressants, antidotes, antiemetics, antihistamines, antihypertensives, antimalarials, antimicrotubule agents (e.g., colchicine or vinca alkaloids), antimigraine agents, antimicrobials, antiphsychotics, antipyretics, antiseptics, anti-signaling agents (e.g., protein kinase C inhibitors or inhibitors of intracellular calcium mobilization), antiarthritics, antithrombin agents, antituberculotics, antitussives, antivirals, appetite suppressants, cardioactive drugs, chemical dependency drugs, cathartics, chemotherapeutic agents, coronary, cerebral or peripheral vasodilators, contraceptive agents, depressants, diuretics, expectorants, growth factors, hormonal agents, hypnotics, immunosuppression agents, narcotic antagonists, parasympathomimetics, sedatives, stimulants, sympathomimetics, toxins (e.g., cholera toxin), tranquilizers and urinary antiinfectives.

[0211] For imaging purposes, any of a variety of diagnostic agents may be incorporated into a pharmaceutical composition, either linked to a modulating agent or free within the composition. Diagnostic agents include any substance administered to illuminate a physiological function within a patient, while leaving other physiological functions generally unaffected. Diagnostic agents include metals, radioactive isotopes and radioopaque agents (e.g., gallium, technetium, indium, strontium, iodine, barium, bromine and phosphorus-containing compounds), radiolucent agents, contrast agents, dyes (e.g., fluorescent dyes and chromophores) and enzymes that catalyze a colorimetric or fluorometric reaction. In general, such agents may be attached using a variety of techniques as described above, and may be present in any orientation.

[0212] The compositions described herein may be administered as part of a sustained release formulation (i.e., a formulation such as a capsule or sponge that effects a slow release of modulating agent following administration). Such formulations may generally be prepared using well known technology and administered by, for example, oral, rectal or subcutaneous implantation, or by implantation at the desired target site. Sustained-release formulations may contain a modulating agent dispersed in a carrier matrix and/or contained within a reservoir surrounded by a rate controlling membrane (see, e.g., European Patent Application 710,491 A). Carriers for use within such formulations are biocompatible, and may also be biodegradable; preferably the formulation provides a relatively constant level of modulating agent release. The amount of modulating agent contained within a sustained release formulation depends upon the site of implantation, the rate and expected duration of release and the nature of the condition to be treated or prevented.

[0213] Pharmaceutical compositions of the present invention may be administered in a manner appropriate to the disease to be treated (or prevented). Appropriate dosages and a suitable duration and frequency of administration will be determined by such factors as the condition of the patient, the type and severity of the patient's disease and the method of administration. In general, an appropriate dosage and treatment regimen provides the modulating agent(s) in an amount sufficient to provide therapeutic and/or prophylactic benefit. Within particularly preferred embodiments of the invention, a modulating agent or pharmaceutical composition as described herein may be administered at a dosage ranging from 0.001 to 50 mg/kg body weight, preferably from 0.1 to 20 mg/kg, on a regimen of single or multiple daily doses. For topical administration, a cream typically comprises an amount of modulating agent ranging from 0.00001% to 1%, preferably 0.0001% to 0.002%. Fluid compositions typically contain about 10 ng/ml to 5 mg/ml, preferably from about 10 μg to 2 mg/mL modulating agent. Appropriate dosages may generally be determined using experimental models and/or clinical trials. In general, the use of the minimum dosage that is sufficient to provide effective therapy is preferred. Patients may generally be monitored for therapeutic effectiveness using assays suitable for the condition being treated or prevented, which will be familiar to those of ordinary skill in the art.

Modulating Agent Methods of Use

[0214] In general, the modulating agents and compositions described herein may be used for modulating a function, such as cell adhesion, of nonclassical cadherin-expressing cells. Such modulation may be performed in vitro and/or in vivo, preferably in a mammal such as a human, using any method that contacts the nonclassical cadherin-expressing cell with the modulating agent. As noted above, modulating agents for purposes that involve the disruption of nonclassical cadherin-mediated cell adhesion may comprise a nonclassical cadherin CAR sequence, multiple nonclassical cadherin CAR sequences in close proximity and/or a substance (such as an antibody or an antigen-binding fragment thereof) that recognizes a nonclassical cadherin CAR sequence. When it is desirable to also disrupt cell adhesion mediated by other adhesion molecules, a modulating agent may additionally comprise one or more CAR sequences bound by such adhesion molecules (and/or antibodies or fragments thereof that bind such sequences), preferably separated from each other and from the nonclassical cadherin CAR sequence by linkers. As noted above, such linkers may or may not comprise one or more amino acids. For enhancing cell adhesion, a modulating agent may contain multiple nonclassical cadherin CAR sequences derived from either a particular nonclassical cadherin or antibodies (or fragments), preferably separated by linkers, and/or may be linked to a single molecule or to a support material as described above. When it is desirable to also enhance cell adhesion mediated by other adhesion molecules, a modulating agent may additionally comprise one or more CAR sequences bound by such adhesion molecules (and/or antibodies or fragments thereof that bind such sequences), preferably separated from each other and from the nonclassical cadherin CAR sequence by linker.

[0215] Certain methods involving the disruption of cell adhesion as described herein have an advantage over prior techniques in that they block tumor cell adhesion. As described in greater detail below, modulating agents as described herein may also be used to disrupt or enhance cell adhesion in a variety of other contexts. Within each of the methods described herein, one or more modulating agents may generally be administered alone, or within a pharmaceutical composition. In each specific method described herein, as noted above, a targeting agent may be employed to increase the local concentration of modulating agent at the target site.

[0216] Within one aspect, methods are provided in which cell adhesion is diminished. In one such aspect, the present invention provides methods for reducing unwanted cellular adhesion in a mammal by administering a modulating agent as described herein. Unwanted cellular adhesion can occur, for example, between tumor cells, between tumor cells and normal cells or between normal cells as a result of surgery, injury, chemotherapy, disease, inflammation or other condition jeopardizing cell viability or function. Certain preferred modulating agents for use within such methods comprise one or more of the nonclassical CAR sequences provided herein. In one particularly preferred embodiment, a modulating agent is further capable of disrupting cell adhesion mediated by multiple adhesion molecules. Such an agent may comprise, in addition to one or more nonclassical cadherin CAR sequences, CAR sequences such as the classical cadherin CAR sequence HAV sequence, an RGD sequence, which is bound by integrins, the occludin CAR sequence LYHY (SEQ ID NO:52); and/or the putative claudin CAR sequence IYSY (SEQ ID NO:51), preferably separated from the nonclassical cadherin CAR sequence via a linker. Alternatively, separate modulators of cell adhesion mediated by other adhesion molecules may be administered in conjunction with the modulating agent(s), either within the same pharmaceutical composition or separately.

[0217] Topical administration of the modulating agent(s) is generally preferred, but other means may also be employed. Preferably, a fluid composition for topical administration (comprising, for example, physiological saline) comprises an amount of modulating agent as described above, and more preferably from 10 μg/mL to 1 mg/mL. Creams may generally be formulated as described above. Topical administration in the surgical field may be given once at the end of surgery by irrigation of the wound or as an intermittent or continuous irrigation with the use of surgical drains in the post-operative period or by the use of drains specifically inserted in an area of inflammation, injury or disease in cases where surgery does not need to be performed. Alternatively, parenteral or transcutaneous administration may be used to achieve similar results.

[0218] Certain modulating agents as provided herein may be used to facilitate transdermal drug delivery. Transdermal delivery of drugs is a convenient and non-invasive method that can be used to maintain relatively constant blood levels of a drug. In general, to facilitate drug delivery via the skin, it is necessary to perturb adhesion between the epithelial cells (keratinocytes) and the endothelial cells of the microvasculature. Using currently available techniques, only small, uncharged molecules may be delivered across skin in vivo. The methods described herein are not subject to the same degree of limitation. Accordingly, a wide variety of drugs may be transported across the epithelial and endothelial cell layers of skin, for systemic or topical administration. Such drugs may be delivered to melanomas or may enter the blood stream of the mammal for delivery to other sites within the body.

[0219] To enhance the delivery of a drug through the skin, a modulating agent as described herein and a drug are contacted with the skin surface. Certain preferred modulating agents for use within such methods comprise a CAR sequence (or an analogue or mimetic thereof) of OB-cadherin, cadherin-5, a desmoglein or a desmocollin. Multifunctional modulating agents comprising multiple nonclassical cadherin CAR sequences may also be used. Such modulating agents may also, or alternatively, comprise the classical cadherin CAR sequence HAV, the fibronectin CAR sequence RGD, which is recognized by integrins, and/or the occludin CAR sequence LYHY (SEQ ID NO:52). Alternatively, a separate modulator of cell adhesion may be administered in conjunction with the modulating agent(s), either within the same pharmaceutical composition or separately.

[0220] Contact may be achieved by direct application of the modulating agent, generally within a composition formulated as a cream or gel, or using any of a variety of skin contact devices for transdermal application (such as those described in European Patent Application No. 566,816 A; U.S. Pat. No. 5,613,958; U.S. Pat. No. 5,505,956). A skin patch provides a convenient method of administration (particularly for slow-release formulations). Such patches may contain a reservoir of modulating agent and drug separated from the skin by a membrane through which the drug diffuses. Within other patch designs, the modulating agent and drug may be dissolved or suspended in a polymer or adhesive matrix that is then placed in direct contact with the patient's skin. The modulating agent and drug may then diffuse from the matrix into the skin. Modulating agent(s) and drug(s) may be contained within the same composition or skin patch, or may be separately administered, although administration at the same time and site is preferred. In general, the amount of modulating agent administered via the skin varies with the nature of the condition to be treated or prevented, but may vary as described above. Such levels may be achieved by appropriate adjustments to the device used, or by applying a cream formulated as described above. Transfer of the drug across the skin and to the target tissue may be predicted based on in vitro studies using, for example, a Franz cell apparatus, and evaluated in vivo by appropriate means that will be apparent to those of ordinary skill in the art. As an example, monitoring of the serum level of the administered drug over time provides an easy measure of the drug transfer across the skin.

[0221] Transdermal drug delivery as described herein is particularly useful in situations in which a constant rate of drug delivery is desired, to avoid fluctuating blood levels of a drug. For example, morphine is an analgesic commonly used immediately following surgery. When given intermittently in a parenteral form (intramuscular, intravenous), the patient usually feels sleepy during the first hour, is well during the next 2 hours and is in pain during the last hour because the blood level goes up quickly after the injection and goes down below the desirable level before the 4 hour interval prescribed for re-injection is reached. Transdermal administration as described herein permits the maintenance of constant levels for long periods of time (e.g., days), which allows adequate pain control and mental alertness at the same time. Insulin provides another such example. Many diabetic patients need to maintain a constant baseline level of insulin which is different from their needs at the time of meals. The baseline level may be maintained using transdermal administration of insulin, as described herein. Antibiotics may also be administered at a constant rate, maintaining adequate bactericidal blood levels, while avoiding the high levels that are often responsible for the toxicity (e.g., levels of gentamycin that are too high typically result in renal toxicity).

[0222] Drug delivery by the methods of the present invention also provide a more convenient method of drug administration. For example, it is often particularly difficult to administer parenteral drugs to newborns and infants because of the difficulty associated with finding veins of acceptable caliber to catheterize. However, newborns and infants often have a relatively large skin surface as compared to adults. Transdermal drug delivery permits easier management of such patients and allows certain types of care that can presently be given only in hospitals to be given at home. Other patients who typically have similar difficulties with venous catheterization are patients undergoing chemotherapy or patients on dialysis. In addition, for patients undergoing prolonged therapy, transdermal administration as described herein is more convenient than parenteral administration.

[0223] Transdermal administration as described herein also allows the gastrointestinal tract to be bypassed in situations where parenteral uses would not be practical. For example, there is a growing need for methods suitable for administration of therapeutic small peptides and proteins, which are typically digested within the gastrointestinal tract. The methods described herein permit administration of such compounds and allow easy administration over long periods of time. Patients who have problems with absorption through their gastrointestinal tract because of prolonged ileus or specific gastrointestinal diseases limiting drug absorption may also benefit from drugs formulated for transdermal application as described herein.

[0224] Further, there are many clinical situations where it is difficult to maintain compliance. For example, patients with mental problems (e.g., patients with Alzheimer's disease or psychosis) are easier to manage if a constant delivery rate of drug is provided without having to rely on their ability to take their medication at specific times of the day. Also patients who simply forget to take their drugs as prescribed are less likely to do so if they merely have to put on a skin patch periodically (e.g., every 3 days). Patients with diseases that are without symptoms, like patients with hypertension, are especially at risk of forgetting to take their medication as prescribed.

[0225] For patients taking multiple drugs, devices for transdermal application such as skin patches may be formulated with combinations of drugs that are frequently used together. For example, many heart failure patients are given digoxin in combination with furosemide. The combination of both drugs into a single skin patch facilitates administration, reduces the risk of errors (taking the correct pills at the appropriate time is often confusing to older people), reduces the psychological strain of taking “so many pills,” reduces skipped dosage because of irregular activities and improves compliance.

[0226] The methods described herein are particularly applicable to humans, but also have a variety of veterinary uses, such as the administration of growth factors or hormones (e.g., for fertility control) to an animal.

[0227] As noted above, a wide variety of drugs may be administered according to the methods provided herein. Some examples of drug categories that may be administered transdermally include anti-inflammatory drugs (e.g., in arthritis and in other condition) such as all NSAID, indomethacin, prednisone, etc.; analgesics (especially when oral absorption is not possible, such as after surgery, and when parenteral administration is not convenient or desirable), including morphine, codeine, Demerol, acetaminophen and combinations of these (e.g., codeine plus acetaminophen); antibiotics such as Vancomycin (which is not absorbed by the GI tract and is frequently given intravenously) or a combination of INH and Rifampicin (e.g., for tuberculosis); anticoagulants such as heparin (which is not well absorbed by the GI tract and is generally given parenterally, resulting in fluctuation in the blood levels with an increased risk of bleeding at high levels and risks of inefficacy at lower levels) and Warfarin (which is absorbed by the GI tract but cannot be administered immediately after abdominal surgery because of the normal ileus following the procedure); antidepressants (e.g., in situations where compliance is an issue as in Alzheimer's disease or when maintaining stable blood levels results in a significant reduction of anti-cholinergic side effects and better tolerance by patients), such as amitriptylin, imipramin, prozac, etc.; antihypertensive drugs (e.g., to improve compliance and reduce side effects associated with fluctuating blood levels), such as diuretics and beta-blockers (which can be administered by the same patch; e.g., furosemide and propanolol); antipsychotics (e.g., to facilitate compliance and make it easier for care giver and family members to make sure that the drug is received), such as haloperidol and chlorpromazine; and anxiolytics or sedatives (e.g., to avoid the reduction of alertness related to high blood levels after oral administration and allow a continual benefit throughout the day by maintaining therapeutic levels constant).

[0228] Numerous other drugs may be administered as described herein, including naturally occurring and synthetic hormones, growth factors, proteins and peptides. For example, insulin and human growth hormone, growth factors like erythropoietin, interleukins and inteferons may be delivered via the skin.

[0229] Kits for administering a drug via the skin of a mammal are also provided within the present invention. Such kits generally comprise a device for transdermal application (e.g., a skin patch) in combination with, or impregnated with, one or more modulating agents. A drug may additionally be included within such kits.

[0230] Within a related aspect, modulating agents as described herein may be used to increase the permeability of endothelial and epithelial cell layers, thereby facilitating sampling of the blood compartment by passive diffusion. Such methods permit the detection and/or measurement of the levels of specific molecules circulating in the blood. In general, to sample the blood compartment, it is necessary to perturb adhesion between the epithelial cells (keratinocytes) and the endothelial cells of the microvasculature. Using currently available techniques, only small, uncharged molecules may be detected across skin in vivo. The methods described herein are not subject to the same degree of limitation. Accordingly, a wide variety of blood components may be sampled across epithelial and endothelial cell layers. Such sampling may be achieved across any such cell layers, including skin and gums.

[0231] For example, application of one or more modulating agents to the skin, via a skin patch as described herein, permits the patch to function like a sponge to accumulate a small quantity of fluid containing a representative sample of the serum. The patch is then removed after a specified amount of time and analyzed by suitable techniques for the compound of interest (e.g., a medication, hormone, growth factor, metabolite or marker). Alternatively, a patch may be impregnated with reagents to permit a color change if a specific substance (e.g., an enzyme) is detected. Substances that can be detected in this manner include, but are not limited to, illegal drugs such as cocaine, HIV enzymes, glucose and PSA. This technology is of particular benefit for home testing kits.

[0232] To facilitate sampling of blood in a patient, a modulating agent as described above for enhancing drug delivery is contacted with the skin surface. Modulating agent(s) and reagents for assaying blood components may, but need not, be contained within the same composition or skin patch. In general, the amount of modulating agent administered via the skin may vary as described above. Such levels may be achieved by appropriate adjustments to the device used, or by applying a cream formulated as described above. Transfer of the blood component across the skin may be predicted based on in vitro studies using, for example, a Franz cell apparatus, and evaluated in vivo by appropriate means that will be apparent to those of ordinary skill in the art.

[0233] Kits for sampling blood component via, for example, the skin or gums of a mammal, are also provided within the present invention. Such kits generally comprise a device for transdermal application (i.e., skin patch) in combination with, or impregnated with, one or more modulating agents. A reagent for detection of a blood component may additionally be included within such kits.

[0234] Within a further aspect, methods are provided for enhancing delivery of a drug to a tumor in a mammal, comprising administering a modulating agent in combination with a drug to a tumor-bearing mammal. Modulating agents for use within such methods include those designed to disrupt functions mediated by OB-cadherin, cadherin-5, cadherin-6, a desmoglein and/or a desmocollin, and may further disrupt E-cadherin and/or N-cadherin mediated cell adhesion. For example, such a modulating agent may comprise a CAR sequence (or analogue or mimetic thereof) derived from one or more of the above cadherins, as described above. A modulating agent may further comprise an E- and/or N-cadherin CAR sequence (e.g., HAV, SHAVSS (SEQ ID NO:59), AHAVDI (SEQ ID NO:60) or a analogue of such a sequence). Bi-functional modulating agents that comprise the nonclassical cadherin CAR sequence with either flanking E-cadherin-specific sequences or flanking N-cadherin-specific sequences joined via a linker to the nonclassical cadherin CAR sequence are also preferred. Preferably, the peptide portion(s) of a modulating agent comprises 6-16 amino acids, since longer peptides are difficult to dissolve in aqueous solution and are more likely to be degraded by peptidases.

[0235] In one particularly preferred embodiment, a modulating agent is capable of disrupting cell adhesion mediated by multiple adhesion molecules. For example, a single branched modulating agent (or multiple agents linked to a single molecule or support material) may disrupt adhesion mediated by a nonclassical cadherin, as well as E-cadherin, N-cadherin, occludin, claudin and integrin mediated cell adhesion. Such agents serve as multifunctional disrupters of cell adhesion. Alternatively, a separate modulator may be administered in conjunction with the modulating agent(s), either within the same pharmaceutical composition or separately. Preferred antibody modulating agents include Fab fragments directed against a nonclassical or classical cadherin CAR sequence, as described above. A Fab fragment may be incorporated into a modulating agent or may be present within a separate modulator that is administered concurrently.

[0236] Preferably, the modulating agent and the drug are formulated within the same composition or drug delivery device prior to administration. In general, a modulating agent may enhance drug delivery to any tumor (e.g., breast tumor, stomach tumor, ovarian tumor or kidney tumor), and the method of administration may be chosen based on the type of target tumor. For example, injection or topical administration as described above may be preferred for melanomas and other accessible tumors (e.g., metastases from primary ovarian tumors may be treated by flushing the peritoneal cavity with the composition). Other tumors (e.g., breast tumors) may be treated by injection of the modulating agent and the drug (such as mitomycin C) into the site of the tumor. In other instances, the composition may be administered systemically, and targeted to the tumor using any of a variety of specific targeting agents. Suitable drugs may be identified by those of ordinary skill in the art based upon the type of cancer to be treated (e.g., taxol for breast cancer). In general, the amount of modulating agent administered varies with the method of administration and the nature of the tumor, within the typical ranges provided above, preferably ranging from about 1 μg/mL to about 2 mg/mL, and more preferably from about 10 μg/mL to 1 mg/mL. Transfer of the drug to the target tumor may be evaluated by appropriate means that will be apparent to those of ordinary skill in the art. Drugs may also be labeled (e.g., using radionuclides) to permit direct observation of transfer to the target tumor using standard imaging techniques.

[0237] Within a related aspect, the present invention provides methods for treating cancer and/or inhibiting metastasis in a mammal. Modulating agents for use within such methods include those designed to disrupt functions mediated by OB-cadherin, cadherin-5, cadherin-6, a desmoglein and/or a desmocollin, and may further disrupt E-cadherin, N-cadherin and/or integrin mediated cell adhesion. For example, such a modulating agent may comprise a CAR sequence (or analogue or mimetic thereof) derived from one or more of the above cadherins, as described above, optionally in combination with a sequence such as HAV, SHAVSS (SEQ ID NO:59), AHAVDI (SEQ ID NO:68), RGD, YIGSR (SEQ ID NO:48) or a derivative of such a sequence. Preferably, the peptide portion(s) of such modulating agents comprise 6-16 amino acids. Preferred antibody modulating agents include Fab fragments directed against a nonclassical or classical cadherin CAR sequence. The Fab fragments may be either incorporated into a modulating agent or may be present within a separate modulator that is administered concurrently.

[0238] A modulating agent may be administered alone (e.g., via the skin) or within a pharmaceutical composition. For melanomas and certain other accessible tumors, injection or topical administration as described above may be preferred. For ovarian cancers, flushing the peritoneal cavity with a composition comprising one or more modulating agents may prevent metastasis of ovarian tumor cells. Other tumors (e.g., bladder tumors, bronchial tumors or tracheal tumors) may be treated by injection of the modulating agent into the cavity. In other instances, the composition may be administered systemically, and targeted to the tumor using any of a variety of specific targeting agents, as described above. Preferably, the tumor is a breast tumor, stomach tumor or kidney tumor. In general, the amount of modulating agent administered varies depending upon the method of administration and the nature of the cancer, but may vary within the ranges identified above. The effectiveness of the cancer treatment or inhibition of metastasis may be evaluated using well known clinical observations, such as monitoring the level of serum tumor markers (e.g., CEA or PSA).

[0239] The addition of a targeting agent as described above may be beneficial, particularly when the administration is systemic. Suitable modes of administration and dosages depend upon the condition to be prevented or treated but, in general, administration by injection is appropriate. Dosages may vary as described above. The effectiveness of the inhibition may be evaluated grossly by assessing the inability of the tumors to maintain their growth and microscopically by observing an absence of nerves at the periphery of the tumor.

[0240] Within further aspects, the present invention provides methods for inhibiting angiogenesis (i.e., the growth of blood vessels from pre-existing blood vessels) in a mammal. Inhibition of angiogenesis may be beneficial, for example, in patients afflicted with diseases such as cancer or arthritis. Preferred modulating agents for inhibition of angiogenesis include those that modulate functions mediated by cadherin-5, such as those that comprises a cadherin-5 CAR sequence or analogue or mimetic thereof. In addition, a modulating agent for use in inhibiting angiogenesis may comprise the sequence RGD, which is recognized by integrins, an OB-cadherin CAR sequence (e.g., DKK), the classical cadherin CAR sequence HAV, and/or the occludin CAR sequence LYHY (SEQ ID NO:52), separated from the cadherin-5 sequence via a linker. Alternatively, a separate modulator of classical cadherin-, integrin- or occludin-mediated cell adhesion may be administered in conjunction with the modulating agent(s), either within the same pharmaceutical composition or separately. The ability of a modulating agent to inhibit angiogenesis may be evaluated as described above.

[0241] The addition of a targeting agent as described above may be beneficial, particularly when the administration is systemic. Suitable modes of administration and dosages depend upon the condition to be prevented or treated but, in general, administration by injection is appropriate. Dosages may vary as described above. The effectiveness of the inhibition may be evaluated grossly by assessing the inability of the tumors to maintain their growth and microscopically by observing an absence of nerves at the periphery of the tumor.

[0242] In yet another related aspect, the present invention provides methods for inducing apoptosis in a nonclassical cadherin-expressing cell. In general, patients afflicted with cancer may benefit from such treatment. Modulating agents for use within such methods may modulate functions mediated any nonclassical cadherin(s). Such agents may comprise, for example, a CAR sequence of such a cadherin, or an analogue or mimetic thereof. In addition, such agents may comprise a sequence such as HAV, SHAVSS (SEQ ID NO:59), AHAVDI (SEQ ID NO:60), RGD, YIGSR (SEQ ID NO:48) or an analogue of such a sequence. Preferably, the peptide portion(s) of such modulating agents comprise 6-16 amino acids. Preferred antibody modulating agents include Fab fragments directed against a nonclassical or classical cadherin CAR sequence. The Fab fragments may be either incorporated into a modulating agent or within a separate modulator that is administered concurrently. Administration may be topical, via injection or by other means, and the addition of a targeting agent may be beneficial, particularly when the administration is systemic. Suitable modes of administration and dosages depend upon the location and nature of the cells for which induction of apoptosis is desired but, in general, dosages may vary as described above. A biopsy may be performed to evaluate the level of induction of apoptosis.

[0243] Within a related aspect, the present invention provides methods for treating obesity in a mammal, by using modulating agents that disrupt OB-cadherin function to inhibit adipocyte adhesion. Alternatively, modulating agents that inhibit angiogenesis as described herein may be used to inhibit fat cell growth. Modulating agents as described herein may be administered alone, or in combination with other agents, which may comprise, for example, a cadherin-5 CAR sequence, HAV, SHAVSS (SEQ ID NO:59), AHAVDI (SEQ ID NO:60), RGD or an analogue of such a sequence. Preferably the peptide portion(s) of such modulating agents comprise 6-16 amino acids. The use of Fab fragments directed against an OB-cadherin, cadherin-5 or N-cadherin CAR sequence is also preferred. A modulating agent may be administered alone (e.g., via the skin) or within a pharmaceutical composition. Injection or topical administration as described above may be preferred. In other instances, the composition may be administered systemically.

[0244] In another embodiment, methods are provided for causing the regression of blood vessels for the treatment of conditions such as cancer, psoriasis, arthritis, and age-related macular degeneration. Cancer tumors are solid masses of cells, growing out of control, which require nourishment via blood vessels. The formation of new capillaries is a prerequisite for tumor growth and the emergence of metastases. Administration of the modulating agents described herein may disrupt blood vessels and cause them to regress, thereby providing effective therapy for patients afflicted with diseases such as cancer. Certain preferred modulating agents for use within such methods comprise, in addition to a nonclassical cadherin CAR sequence (preferably an OB-cadherin or cadherin-5 CAR sequence), a sequence such as HAV and RGD, or an analogue of such a sequence. Preferably, the peptide portion(s) of such modulating agents comprise 6-16 amino acids. Preferred antibody modulating agents include Fab fragments directed against the nonclassical cadherin CAR sequence, with or without Fab fragments directed against one or more classical cadherin CAR sequences. The Fab fragments may be either incorporated into a modulating agent or within a separate modulator that is administered concurrently. Administration may be topical, via injection or by other means, and the addition of a targeting agent may be beneficial, particularly when the administration is systemic. Suitable modes of administration and dosages depend upon the location and nature of the pericytes for which disruption of cell adhesion is desired but, in general, dosages may vary as described above. The effectiveness of the cancer treatment or inhibition of metastasis may be evaluated using well known clinical observations such as the level of serum markers (e.g., CEA or PSA). The addition of a targeting agent may be beneficial, particularly when the administration is systemic. Suitable modes of administration and dosages depend upon the condition to be prevented or treated but, in general, administration by injection is appropriate. Dosages may vary as described above. The effectiveness of the inhibition may be evaluated grossly by assessing the inability of the tumor to maintain growth and microscopically by an absence of nerves at the periphery of the tumor.

[0245] Within another aspect, the present invention provides methods for enhancing drug delivery to the central nervous system (CNS) of a mammal. The blood/brain barrier is largely impermeable to most neuroactive agents, and delivery of drugs to the brain of a mammal often requires invasive procedures. Using a modulating agent as described herein, however, delivery may be by, for example, systemic administration of a modulating agent-drug-targeting agent combination, injection of a modulating agent (alone or in combination with a drug and/or targeting agent) into the carotid artery or application of a skin patch comprising a modulating agent to the head of the patient. Modulating agents for enhancing drug delivery to the central nervous system include those agents that disrupt functions mediated by OB-cadherin or cadherin-5. Certain preferred modulating agents for use within such methods are relatively small cyclic peptides (e.g., a ring size of 4-10 residues; preferably 5-7 residues). Also preferred are multi-functional modulating agents comprising a nonclassical cadherin CAR sequence and an N-cadherin CAR sequence, the putative claudin CAR sequence IYSY (SEQ ID NO:51) and/or occludin CAR sequence, preferably joined by a linker. Alternatively, a separate modulator of N-cadherin, claudin and/or occludin-mediated cell adhesion may be administered in conjunction with the modulating agent(s), either within the same pharmaceutical composition or separately. Modulating agents may further comprise antibodies or Fab fragments directed against the N-cadherin CAR sequence FHLRAHAVDINGNQV-NH₂ (SEQ ID NO:61). Fab fragments directed against the occludin CAR sequence GVNPTAQSSGSLYGSQIYALCNQFYTPAATGLYVDQYLYHYCVVDPQE (SEQ ID NO:62) may also be employed, either incorporated into the modulating agent or administered concurrently as a separate modulator. In general, the amount of modulating agent administered varies with the method of administration and the nature of the condition to be treated or prevented, but typically varies as described above. Transfer of the drug to the central nervous system may be evaluated by appropriate means that will be apparent to those of ordinary skill in the art, such as magnetic resonance imaging (MRI) or PET scan (positron emitted tomography).

[0246] The present invention also provides, within further aspects, methods for enhancing and/or directing neurological growth. In one such aspect, neurite outgrowth may be enhanced and/or directed by contacting a neuron with one or more modulating agents. Modulating agents for enhancing and/or directing neurological growth include those agents that disrupt functions mediated by one or more of cadherin-7, cadherin-8, cadherin-12, cadherin-14, cadherin-15, T-cadherin, PB cadherin, a protocadherin and/or a cadherin-related neuronal receptor. Preferred modulating agents for use within such methods are linked to a polymeric matrix or other support and/or contain multiple CAR sequences separated by one or more linkers. In addition, a modulating agent comprising the cadherin CAR sequence HAV, RGD and/or YIGSR (SEQ ID NO:48), which are bound by integrins, and/or the N-CAM CAR sequence KYSFNYDGSE (SEQ ID NO:63) may further facilitate neurite outgrowth. Modulating agents comprising antibodies, or fragments thereof, may be used within this aspect of the present invention without the use of linkers or support materials. In addition, Fab fragments directed against the N-CAM CAR sequence KYSFNYDGSE (SEQ ID NO:63) or the N-cadherin CAR sequence FHLRAHAVDINGNQV-NH₂ (SEQ ID NO:61) may be employed, either incorporated into the modulating agent or administered concurrently as a separate modulator.

[0247] The method of achieving contact and the amount of modulating agent used will depend upon the location of the neuron and the extent and nature of the outgrowth desired. For example, a neuron may be contacted (e.g., via implantation) with modulating agent(s) linked to a support material such as a suture, fiber nerve guide or other prosthetic device such that the neurite outgrowth is directed along the support material. Alternatively, a tubular nerve guide may be employed, in which the lumen of the nerve guide contains a composition comprising the modulating agent(s). In vivo, such nerve guides or other supported modulating agents may be implanted using well known techniques to, for example, facilitate the growth of severed neuronal connections and/or to treat spinal cord injuries. It will be apparent to those of ordinary skill in the art that the structure and composition of the support should be appropriate for the particular injury being treated. In vitro, a polymeric matrix may similarly be used to direct the growth of neurons onto patterned surfaces as described, for example, in U.S. Pat. No. 5,510,628.

[0248] Within another aspect, one or more modulating agents may be used for therapy of a demyelinating neurological disease in a mammal. There are a number of demyelinating diseases, such as multiple sclerosis, characterized by oligodendrocyte death. Modulating agents for treating and/or preventing such diseases include those agents that disrupt functions mediated by one or more of cadherin-7, cadherin-8, cadherin-12, cadherin-14, cadherin-15, T-cadherin, PB cadherin, a protocadherin and/or a cnr. Modulating agents may further comprise HAV, RGD and/or YIGSR (SEQ ID NO:48), which are bound by integrins, and/or the N-CAM CAR sequence KYSFNYDGSE (SEQ ID NO:63). Such agents, when implanted with Schwann cells into the central nervous system, may facilitate Schwann cell migration and permit the practice of Schwann cell replacement therapy.

[0249] Multiple sclerosis patients suitable for treatment may be identified by criteria that establish a diagnosis of clinically definite or clinically probable MS (see Poser et al., Ann. Neurol. 13:227, 1983). Candidate patients for preventive therapy may be identified by the presence of genetic factors, such as HLA-type DR2a and DR2b, or by the presence of early disease of the relapsing remitting type.

[0250] Schwann cell grafts may be implanted directly into the brain along with the modulating agent(s) using standard techniques. Suitable amounts of modulating agent generally range as described above, preferably from about 10 μg/mL to about 1 mg/mL. Alternatively, a modulating agent may be implanted with oligodendrocyte progenitor cells (OPs) derived from donors not afflicted with the demyelinating disease. The myelinating cell of the CNS is the oligodendrocyte. Although mature oligodendrocytes and immature cells of the oligodendrocyte lineage, such as the oligodendrocyte type 2 astrocyte progenitor, have been used for transplantation, OPs are more widely used. OPs are highly motile and are able to migrate from transplant sites to lesioned areas where they differentiate into mature myelin-forming oligodendrocytes and contribute to repair of demyelinated axons (see e.g., Groves et al., Nature 362:453-55, 1993; Baron-Van Evercooren et al., Glia 16:147-64, 1996). OPs can be isolated using routine techniques known in the art (see e.g., Milner and French-Constant, Development 120:3497-3506, 1994), from many regions of the CNS including brain, cerebellum, spinal cord, optic nerve and olfactory bulb. Substantially greater yields of OP's are obtained from embryonic or neonatal rather than adult tissue. OPs may be isolated from human embryonic spinal cord and cultures of neurospheres established. Human fetal tissue is a potential valuable and renewable source of donor OP's for future, long range transplantation therapies of demyelinating diseases such as MS.

[0251] OPs can be expanded in vitro if cultured as “homotypic aggregates” or “spheres” (Avellana-Adalid et al, J. Neurosci. Res. 45:558-70, 1996). Spheres (sometimes called “oligospheres” or “neurospheres”) are formed when OPs are grown in suspension in the presence of growth factors such as PDGF and FGF. OPs can be harvested from spheres by mechanical dissociation and used for subsequent transplantation or establishment of new spheres in culture. Alternatively, the spheres themselves may be transplanted, providing a “focal reservoir” of OPs (Avellana-Adalid et al, J. Neurosci. Res. 45:558-70, 1996).

[0252] An alternative source of OP may be spheres derived from CNS stem cells. Recently, Reynolds and Weiss, Dev. Biol. 165:1-13, 1996 have described spheres formed from EGF-responsive cells derived from embryonic neuroepithelium, which appear to retain the pluripotentiality exhibited by neuroepithelium in vivo. Cells dissociated from these spheres are able to differentiate into neurons, oligodendrocytes and astrocytes when plated on adhesive substrates in the absence of EGF, suggesting that EGF-responsive cells derived from undifferentiated embryonic neuroepithelium may represent CNS stem cells (Reynolds and Weiss, Dev. Biol. 165:1-13, 1996). Spheres derived from CNS stem cells provide an alternative source of OP which may be manipulated in vitro for transplantation in vivo. Spheres composed of CNS stem cells may further provide a microenvironment conducive to increased survival, migration, and differentiation of the OPs in vivo.

[0253] The use of neurospheres for the treatment of MS may be facilitated by modulating agents that enhance cell migration from the spheres. In the absence of modulating agent, the cells within the spheres adhere tightly to one another and migration out of the spheres is hindered. Modulating agents that disrupt N-cadherin mediated cell adhesion as described herein, when injected with neurospheres into the central nervous system, may improve cell migration and increase the efficacy of OP replacement therapy. Neurosphere grafts may be implanted directly into the central nervous system along with the modulating agent(s) using standard techniques.

[0254] Alternatively, a modulating agent may be administered alone or within a pharmaceutical composition. The duration and frequency of administration will be determined by such factors as the condition of the patient, and the type and severity of the patient's disease. Within particularly preferred embodiments of the invention, the modulating agent or pharmaceutical composition may be administered at a dosage ranging from 0.1 mg/kg to 20 mg/kg although appropriate dosages may be determined by clinical trials. Methods of administration include injection, intravenous or intrathecal (i.e., directly in cerebrospinal fluid). A modulating agent or pharmaceutical composition may further comprise a drug (e.g., an immunomodulatory drug).

[0255] Effective treatment of multiple sclerosis may be evidenced by any of the following criteria: EDSS (extended disability status scale), appearance of exacerbations or MRI (magnetic resonance imaging). The EDSS is a means to grade clinical impairment due to MS (Kurtzke, Neurology 33:1444, 1983), and a decrease of one full step defines an effective treatment in the context of the present invention (Kurtzke, Ann. Neurol. 36:573-79, 1994). Exacerbations are defined as the appearance of a new symptom that is attributable to MS and accompanied by an appropriate new neurologic abnormality (Sipe et al., Neurology 34:1368, 1984). Therapy is deemed to be effective if there is a statistically significant difference in the rate or proportion of exacerbation-free patients between the treated group and the placebo group or a statistically significant difference in the time to first exacerbation or duration and severity in the treated group compared to control group. MRI can be used to measure active lesions using gadolinium-DTPA-enhanced imaging (McDonald et al. Ann. Neurol. 36:14, 1994) or the location and extent of lesions using T₂-weighted techniques. The presence, location and extent of MS lesions may be determined by radiologists using standard techniques. Improvement due to therapy is established when there is a statistically significant improvement in an individual patient compared to baseline or in a treated group versus a placebo group.

[0256] Efficacy of the modulating agent in the context of prevention may be judged based on clinical measurements such as the relapse rate and EDSS. Other criteria include a change in area and volume of T2 images on MRI, and the number and volume of lesions determined by gadolinium enhanced images.

[0257] The present invention also provides methods for increasing vasopermeability in a mammal by administering one or more modulating agents or pharmaceutical compositions. Modulating agents as described herein that decrease OB-cadherin and/or cadherin-5 mediate cell adhesion may be used to increase vascular permeability. Certain preferred modulating agents for use within such methods further inhibit N-cadherin, claudin and/or occludin mediated adhesion. Such agents may comprise, in addition to an OB-cadherin and/or cadherin-5 CAR sequence, a sequence such as LYHY (the occludin CAR sequence; SEQ ID NO:52), IYSY (the putative claudin CAR sequence; SEQ ID NO:51) HAV and RGD, or an analogue of such a sequence. Preferably, the peptide portion(s) of such modulating agents comprise 6-16 amino acids. Preferred antibody modulating agents include Fab fragments directed against one or more of the OB-cadherin, cadherin-5, classical cadherin, claudin and/or occludin CAR sequences. The Fab fragments may be either incorporated into a modulating agent or within a separate modulator that is administered concurrently.

[0258] Treatment with a modulating agent may be appropriate, for example, prior to administration of an anti-tumor therapeutic or diagnostic agent (e.g., a monoclonal antibody or other macromolecule), an antimicrobial agent or an anti-inflammatory agent, in order to increase the concentration of such agents in the vicinity of the target tumor, organism or inflammation without increasing the overall dose to the patient. Modulating agents for use within such methods may be linked to a targeting agent to further increase the local concentration of modulating agent, although systemic administration of a vasoactive agent even in the absence of a targeting agent increases the perfusion of certain tumors relative to other tissues. Suitable targeting agents include antibodies and other molecules that specifically bind to tumor cells or to components of structurally abnormal blood vessels. For example, a targeting agent may be an antibody that binds to a fibrin degradation product or a cell enzyme such as a peroxidase that is released by granulocytes or other cells in necrotic or inflamed tissues.

[0259] Administration via intravenous injection or transdermal administration is generally preferred. Effective dosages are generally sufficient to increase localization of a subsequently administered diagnostic or therapeutic agent to an extent that improves the clinical efficacy of therapy of accuracy of diagnosis to a statistically significant degree. Comparison may be made between treated and untreated tumor host animals to whom equivalent doses of the diagnostic or therapeutic agent are administered. In general, dosages range as described above.

[0260] In certain other aspects, the present invention provides methods for enhancing adhesion of nonclassical cadherin-expressing cells. Within certain embodiments, a modulating agent may be linked to a solid support, resulting in a matrix that comprises multiple modulating agents. Within one such embodiment, the support is a polymeric matrix to which modulating agents and molecules comprising other CAR sequence(s) are attached (e.g., modulating agents and molecules comprising either HAV or RGD sequences may be attached to the same matrix, preferably in an alternating pattern). Such matrices may be used in contexts in which it is desirable to enhance adhesion mediated by multiple cell adhesion molecules. Alternatively, the modulating agent itself may comprise multiple nonclassical cadherin CAR sequences or antibodies (or fragments thereof), separated by linkers as described above. Either way, the modulating agent(s) function as a “biological glue” to bind multiple nonclassical cadherin-expressing cells within a variety of contexts.

[0261] Within one such aspect, modulating agents comprising the nonclassical cadherin CAR sequence and/or multiple modulating agents linked to a single molecule or support material may be used to facilitate wound healing and/or reduce scar tissue in a mammal. Peptides that may be linked to a support, and/or to one another via a linker, to generate a suitable modulating agent include, but are not limited to, one or more nonclassical cadherin CAR sequences, or analogues or mimetics thereof. Suitable nonclassical CAR sequences include OB-cadherin, cadherin-5, desmoglein and/or desmocollin CAR sequences. Such nonclassical CAR sequences may be used in combination with one or more classical cadherin CAR sequences, including HAV, SHAVSS (SEQ ID NO:59), AHAVDI (SEQ ID NO:60), or an analogue of such a sequence. Preferred antibody modulating agents include Fab fragments directed against either the nonclassical cadherin or E-cadherin CAR sequences. Modulating agents that are linked to a biocompatible and biodegradable matrix such as cellulose or collagen are particularly preferred. For use within such methods, a modulating agent should have a free amino or hydroxyl group. The modulating agents are generally administered topically to the wound, where they may facilitate closure of the wound and may augment, or even replace, stitches. Similarly, administration of matrix-linked modulating agents may facilitate cell adhesion in skin grafting and prosthetic implants, and may prolong the duration and usefulness of collagen injection. In general, the amount of matrix-linked modulating agent administered to a wound, graft or implant site varies with the severity of the wound and/or the nature of the wound, graft, or implant, but may vary as discussed above. Multi-functional modulating agents comprising a nonclassical cadherin sequence, a classical cadherin CAR sequence (HAV), and the CAR sequence bound by certain integrins (RGD) may also be used as potent stimulators of wound healing and/or to reduce scar tissue. Alternatively, one or more separate modulators of classical cadherin- or integrin-mediated cell adhesion may be administered in conjunction with the modulating agent(s), either within the same pharmaceutical composition or separately.

[0262] Within further aspects, modulating agents, such as desmosomal cadherin modulating agents, may be used for the treatment of autoimmune blistering disorders, such as pemphigus vulgaris, pemphigus foliaceus and intercellular IgA dermatosis. These disorders are pathological conditions in which a patient begins to develop antibodies against one or more desmosomal cadherins. In consequence, adhesion of skin cells begins to fail, resulting in various kinds of blistering. The use of modulating agents to enhance desmosomal cadherin-mediated cell adhesion may alleviate symptoms of such disorders. Optionally, such methods would be performed in conjunction with a method for eliminating the anti-cadherin antibodies. Modulating agents for use in such therapies may comprise one desmosomal cadherin CAR sequence or, preferably, comprise a desmoglein CAR sequence and a desmocollin CAR sequence. Optionally, a modulating agent further comprises one or more other nonclassical cadherin CAR sequences, such as CAR sequences derived from OB-cadherin or cadherin-5 and/or one or more classical cadherin CAR sequences, including HAV, SHAVSS (SEQ ID NO: 59), AHAVDI (SEQ ID NO: 60, or an analogue of such a sequence. Preferred antibody modulating agents include Fab fragments directed against either the nonclassical cadherin or E-cadherin CAR sequences. Modulating agents that are linked to a biocompatible and biodegradable matrix such as cellulose or collagen are particularly preferred. For use within such methods, a modulating agent should have a free amino or hydroxyl group. The modulating agents are generally administered topically to the site of blisters. In general, the amount of matrix-linked modulating agent administered to a blister site varies with the severity of the condition, and generally ranges as discussed above. Multi-functional modulating agents comprising one or more desmosomal cadherin sequences, a classical cadherin CAR sequence (HAV), and the CAR sequence bound by certain integrins (RGD) may also be used. Alternatively, one or more separate modulators of classical cadherin- or integrin-mediated cell adhesion may be administered in conjunction with the modulating agent(s), either within the same pharmaceutical composition or separately.

[0263] Within another aspect, one or more modulating agents may be linked to the interior surface of a tissue culture plate or other cell culture support, such as for use in a bioreactor. Such linkage may be performed by any suitable technique, as described above. Modulating agents linked in this fashion may generally be used to immobilize cadherin-expressing cells. For example, dishes or plates coated with one or more modulating agents may be used to immobilize cadherin-expressing cells within a variety of assays and screens. Within bioreactors (i.e., systems for large scale production of cells or organoids), modulating agents may generally be used to improve cell attachment and stabilize cell growth. Modulating agents may also be used within bioreactors to support the formation and function of highly differentiated organoids derived, for example, from dispersed populations of fetal mammalian cells. Bioreactors containing biomatrices of modulating agent(s) may also be used to facilitate the production of specific proteins.

[0264] Modulating agents as described herein may be used within a variety of bioreactor configurations. In general, a bioreactor is designed with an interior surface area sufficient to support large numbers of adherent cells. This surface area can be provided using membranes, tubes, microtiter wells, columns, hollow fibers, roller bottles, plates, dishes, beads or a combination thereof. A bioreactor may be compartmentalized. The support material within a bioreactor may be any suitable material known in the art; preferably, the support material does not dissolve or swell in water. Preferred support materials include, but are not limited to, synthetic polymers such as acrylics, vinyls, polyethylene, polypropylene, polytetrafluoroethylene, nylons, polyurethanes, polyamides, polysulfones and poly(ethylene terephthalate); ceramics; glass and silica.

[0265] Within a further aspect, modulating agents as described herein may be used for controlled inhibition of synaptic stability, resulting in increased synaptic plasticity. Within this aspect, administration of one or more modulating agents that inhibit cnr-mediated cell adhesion may be advantageous for repair processes within the brain, as well as learning and memory, in which neural plasticity is a key early event in the remodeling of synapses. In addition, a preferred modulating agent may comprise one or more additional CAR sequences, such as HAV, RGD and/or the N-CAM CAR sequence KYSFNYDGSE (SEQ ID NO:63). As noted above, such additional sequence(s) may be separated from the nonclassical CAR sequence via a linker. Alternatively, a separate modulator of cell adhesion mediated by a different adhesion molecule may be administered in conjunction with the modulating agent(s), either within the same pharmaceutical composition or separately. For such aspects, administration may be via encapsulation into a delivery vehicle such as a liposome, using standard techniques, and injection into, for example, the carotid artery. Alternatively, a modulating agent may be linked to a disrupter of the blood-brain barrier. In general dosages range as described above.

[0266] Within further aspects, modulating agents as described herein may be used for modulating the immune system of a mammal in any of several ways. Cadherins are expressed on immature B and T cells (thymocytes and bone marrow pre-B cells), as well as on specific subsets of activated B and T lymphocytes and some hematological malignancies. Modulating agents may generally be used to modulate specific steps within cellular interactions during an immune response or during the dissemination of malignant lymphocytes.

[0267] For example, a modulating agent as described herein may be used to treat diseases associated with excessive generation of otherwise normal T cells. Without wishing to be bound by any particular theory, it is believed that the interaction of cadherins on maturing T cells and B cell subsets contributes to protection of these cells from programmed cell death. A modulating agent may decrease such interactions, leading to the induction of programmed cell death. Accordingly, modulating agents may be used to treat certain types of diabetes and rheumatoid arthritis, particularly in young children where the cadherin expression on thymic pre-T cells is greatest.

[0268] Modulating agents may also be administered to patients afflicted with certain skin disorders (such as cutaneous lymphomas), acute B cell leukemia and excessive immune reactions involving the humoral immune system and generation of immunoglobulins, such as allergic responses and antibody-mediated graft rejection. In addition, patients with circulating cadherin-positive malignant cells (e.g., during regimes where chemotherapy or radiation therapy is eliminating a major portion of the malignant cells in bone marrow and other lymphoid tissue) may benefit from treatment with a modulating agent. Such treatment may also benefit patients undergoing transplantation with peripheral blood stem cells.

[0269] Preferred modulating agents for use within such methods include those that disrupt OB-cadherin, cadherin-5, cadherin-6 and/or cadherin-8 mediated cell adhesion. In addition, a preferred modulating agent may comprise one or more additional CAR sequences, such as HAV, RGD, LYHY (SEQ ID NO:52) and/or KYSFNYDGSE (SEQ ID NO:63). As noted above, such additional sequence(s) may be separated from a nonclassical CAR sequence via a linker. Alternatively, a separate modulator of classical cadherin-, occludin-, integrin- and/or N-CAM-mediated cell adhesion may be administered in conjunction with the modulating agent(s), either within the same pharmaceutical composition or separately.

[0270] Within the above methods, the modulating agent(s) are preferably administered systemically (usually by injection) or topically. A modulating agent may be linked to a targeting agent. For example, targeting to the bone marrow may be beneficial. A suitable dosage is sufficient to effect a statistically significant reduction in the population of B and/or T cells that express cadherin and/or an improvement in the clinical manifestation of the disease being treated. Typical dosages generally range as described above.

[0271] Within further aspects, the present invention provides methods and kits for preventing pregnancy in a mammal. In general, disruption of OB-cadherin function prevents the adhesion of trophoblasts and their subsequent fusion to form syncitiotrophoblasts, whereas disruption of cadherin-5 function prevents angiogenesis. In one embodiment, one or more modulating agents may be incorporated into any of a variety of well known contraceptive devices, such as sponges suitable for intravaginal insertion (see, e.g., U.S. Pat. No. 5,417,224) or capsules for subdermal implantation. Other modes of administration are possible, however, including transdermal administration, for modulating agents linked to an appropriate targeting agent.

[0272] Preferred modulating agents for use within such methods include those comprising an OB-cadherin and/or cadherin-5 CAR sequence, or analogue or mimetic thereof. In addition, a preferred modulating agent may comprise additional CAR sequences, such as HAV and/or RGD. As noted above, such additional sequences may be separated from the nonclassical CAR sequence via a linker. Alternatively, a separate modulator of classical cadherin- and/or integrin-mediated cell adhesion may be administered in conjunction with the modulating agent(s), either within the same pharmaceutical composition or separately.

[0273] Suitable methods for incorporation into a contraceptive device depend upon the type of device and are well known in the art. Such devices facilitate administration of the modulating agent(s) to the uterine region and may provide a sustained release of the modulating agent(s). In general, modulating agent(s) may be administered via such a contraceptive device at a dosage ranging from 0.1 to 50 mg/kg, although appropriate dosages may be determined by monitoring hCG levels in the urine. hCG is produced by the placenta, and levels of this hormone rise in the urine of pregnant women. The urine hCG levels can be assessed by radio-immunoassay using well known techniques. Kits for preventing pregnancy generally comprise a contraceptive device impregnated with one or more modulating agents.

[0274] Alternatively, a sustained release formulation of one or more modulating agents may be implanted, typically subdermally, in a mammal for the prevention of pregnancy. Such implantation may be performed using well known techniques. Preferably, the implanted formulation provides a dosage as described above, although the minimum effective dosage may be determined by those of ordinary skill in the art using, for example, an evaluation of hCG levels in the urine of women.

[0275] Other aspects of the present invention provide methods that employ antibodies raised against the nonclassical CAR sequences for diagnostic and assay purposes. Assays typically involve using an antibody to detect the presence or absence of a nonclassical cadherin (free or on the surface of a cell), or proteolytic fragments containing one or more EC domains in a suitable biological sample, such as tumor or normal tissue biopsies, blood, lymph node, serum or urine samples, or other tissue, homogenate, or extract thereof obtained from a patient.

[0276] There are a variety of assay formats known to those of ordinary skill in the art for using an antibody to detect a target molecule in a sample. See, e.g., Harlow and Lane, Antibodies: A Laboratory Manual, Cold Spring Harbor Laboratory, 1988. For example, the assay may be performed in a Western blot format, wherein a protein preparation from the biological sample is submitted to gel electrophoresis, transferred to a suitable membrane and allowed to react with the antibody. The presence of the antibody on the membrane may then be detected using a suitable detection reagent, as described below.

[0277] In another embodiment, the assay involves the use of antibody immobilized on a solid support to bind to the target cadherin, or a proteolytic fragment containing an extracellular domain and encompassing a CAR sequence, and remove it from the remainder of the sample. The bound cadherin may then be detected using a second antibody or reagent that contains a reporter group. Alternatively, a competitive assay may be utilized, in which a cadherin is labeled with a reporter group and allowed to bind to the immobilized antibody after incubation of the antibody with the sample. The extent to which components of the sample inhibit the binding of the labeled cadherin to the antibody is indicative of the reactivity of the sample with the immobilized antibody, and as a result, indicative of the level of the cadherin in the sample.

[0278] The solid support may be any material known to those of ordinary skill in the art to which the antibody may be attached, such as a test well in a microtiter plate, a nitrocellulose filter or another suitable membrane. Alternatively, the support may be a bead or disc, such as glass, fiberglass, latex or a plastic such as polystyrene or polyvinylchloride. The antibody may be immobilized on the solid support using a variety of techniques known to those in the art, which are amply described in the patent and scientific literature.

[0279] In certain embodiments, the assay for detection of a nonclassical cadherin in a sample is a two-antibody sandwich assay. This assay may be performed by first contacting an antibody that has been immobilized on a solid support, commonly the well of a microtiter plate, with the biological sample, such that the nonclassical cadherin within the sample is allowed to bind to the immobilized antibody (a 30 minute incubation time at room temperature is generally sufficient). Unbound sample is then removed from the immobilized cadherin-antibody complexes and a second antibody (containing a reporter group such as an enzyme, dye, radionuclide, luminescent group, fluorescent group or biotin) capable of binding to a different site on the cadherin is added. The amount of second antibody that remains bound to the solid support is then determined using a method appropriate for the specific reporter group. The method employed for detecting the reporter group depends upon the nature of the reporter group. For radioactive groups, scintillation counting or autoradiographic methods are generally appropriate. Spectroscopic methods may be used to detect dyes, luminescent groups and fluorescent groups. Biotin may be detected using avidin, coupled to a different reporter group (commonly a radioactive or fluorescent group or an enzyme). Enzyme reporter groups may generally be detected by the addition of substrate (generally for a specific period of time), followed by spectroscopic or other analysis of the reaction products. Standards and standard additions may be used to determine the level of cadherin in a sample, using well known techniques.

[0280] Such immunoassays may be used, for example, in the diagnosis and monitoring of conditions associated with abnormal desmosomal cadherin expression. As noted above, such conditions include autoimmune blistering disorders, such as pemphigus vulgaris, pemphigus foliaceus and intercellular IgA dermatosis. In general, the presence or absence of such a condition in a patient may be determined by (a) contacting a biological sample obtained from a patient with an antibody or antigen-binding fragment thereof; (b) detecting in the sample a level or pattern of polypeptide that binds to the antibody or fragment thereof; and (c) comparing the level or pattern of polypeptide with a predetermined cut-off value or a normal pattern. In general, these diseases are associated with an autoimmune response against desmosomal cadherins, which causes the internalization of these cadherins. Such internalization may be visualized as patchy cytoplasmic granules in stained biopsy sections of lesional and perilesional keratinocytes (see Iwatsuki et al., Br. J. Dermatol. 140:35-43). These granules are not detected in normal patients.

[0281] Immunoassays for the detection of desmosomal cadherins may further be used to differentiate between benign skin lesions, such as keratoacanthoma, and squamous cell carcinoma. The location of desmoglein staining, in particular, may be used to differentiate between a keratoacanthoma and a carcinoma (see Krunic et al., Acta Derm. Venereol. 76:394-398, 1996). In general, extensive pericellular staining indicates a keratoacanthoma. Focal pericellular staining indicates a keratoacanthoma or a well-differentiated squamous cell carcinoma. No staining or juxtanuclear staining indicates a poorly differentiated squamous cell carcinoma. Thus, a reduction of pericellular staining (as determined visually or quantitatively, as a reduction of 50%) is indicative of squamous cell carcinoma.

[0282] The present invention also provides kits for use in such immunoassays. Such kits generally comprise one or more antibodies, as described above. In addition, one or more additional compartments or containers of a kit generally enclose elements, such as reagents, buffers and/or wash solutions, to be used in the immunoassay.

[0283] Within further aspects, modulating agents or antibodies (or fragments thereof) may be used to facilitate cell identification and sorting in vitro or imaging in vivo, permitting the selection of cells expressing the nonclassical cadherin (or different nonclassical cadherin levels). Preferably, the modulating agent(s) or antibodies for use in such methods are linked to a detectable marker. Suitable markers are well known in the art and include radionuclides, luminescent groups, fluorescent groups, enzymes, dyes, constant immunoglobulin domains and biotin. Within one preferred embodiment, a modulating agent linked to a fluorescent marker, such as fluorescein, is contacted with the cells, which are then analyzed by fluorescence activated cell sorting (FACS).

[0284] Antibodies or fragments thereof may also be used within screens of combinatorial or other nonpeptide-based libraries to identify other compounds capable of modulating nonclassical cadherin-mediated cell adhesion. Such screens may generally be performed using an ELISA or other method well known to those of ordinary skill in the art that detect compounds with a shape and structure similar to that of the modulating agent. In general, such screens may involve contacting an expression library producing test compounds with an antibody, and detecting the level of antibody bound to the candidate compounds. Compounds for which the antibody has a higher affinity may be further characterized as described herein, to evaluate the ability to modulate OB-cadherin-mediated cell adhesion.

[0285] Certain methods of the invention relate to detecting and evaluating cancer in a patient. The methods provided herein are based, in part, on the discovery that nonclassical cadherins, e.g., OB-cadherin and N-cadherin, are expressed by metastatic carcinoma cells, but not by highly differentiated, poorly invasive carcinomas. Accordingly, metastatic cancers may be detected and monitored using methods that evaluate nonclassical cadherin expression, such as desmosomal cadherin, OB-cadherin and/or N-cadherin expression, etc. Certain methods provided herein employ binding agents, such as antibodies and fragments thereof, that specifically recognize a nonclassical cadherin extracellular domain, or a portion thereof. Other methods employ one or more polynucleotides that hybridize to a polynucleotide encoding a nonclassical cadherin, or to a sequence that is a complement of such a polynucleotide. In general, within the methods provided herein, a biological sample obtained from a patient is typically contacted with such a binding agent or polynucleotide so as to permit determination of the level of nonclassical cadherin, or the level of polynucleotide encoding a nonclassical cadherin within the sample. This determination is indicative of the presence or absence of a metastatic cancer, and may be used to evaluate the metastatic potential of a cancer and monitor cancer progression.

[0286] For generating and testing binding agents, as described herein, polypeptides comprising a portion of a nonclassical cadherin may be used. Such polypeptides may, if they comprise a cell adhesion recognition sequence (CAR sequence), also be used as binding agents themselves. Preferred portions are extracellular domains and portions thereof, such as a portion comprising a CAR sequence. An extracellular domain of a nonclassical cadherin may generally be identified based on homology to the extracellular domain sequences provided herein, and using well known techniques, such as the presence of one or more of: a hydrophilic sequence, a region that is recognized by an antibody, a region that is cleaved by trypsin and/or a potential glycosylation site with the glycosylation motif Asn-X-Ser/Thr. A polypeptide may comprise an entire extracellular domain or a portion thereof, and may consist entirely of the nonclassical cadherin sequence, or may additionally comprise further peptide and/or non-peptide regions. Additional peptide regions may be derived from a nonclassical cadherin and/or may be heterologous. Such a peptide may be a linear or cyclic peptide, cyclized via an intramolecular bond that may be backbone to backbone, side-chain to backbone or side-chain to side-chain.

[0287] Binding agents (such as OB-cadherin or N-cadherin CAR sequences and antibodies raised against an OB-cadherin or N-cadherin sequence), as well as polynucleotide probes and primers may be used for a variety of diagnostic and assay purposes. In general, such binding agents and polynucleotides may be used to detect a metastatic cancer in a patient, to monitor progression of a cancer or to evaluate the metastatic potential of a cancer. It has been found, within the context of the present invention, for example, that OB-cadherin and/or N-cadherin are expressed by highly invasive cancer cells. Such cells do not generally express E-cadherin at a detectable level. In contrast, highly differentiated, poorly invasive carcinomas express E-cadherin, but do not express OB-cadherin and/or N-cadherin. Accordingly, a metastatic cancer may be detected in a patient based on an elevated level of OB-cadherin or N-cadherin (or RNA encoding OB-cadherin or N-cadherin) present within a biological sample obtained from the patient. Further information regarding metastatic potential of a cancer may be obtained by also evaluating E-cadherin expression within the same or a similar sample.

[0288] Biological samples for use within such assays include blood, sera, urine, tumor or normal tissue biopsies, lymph node, peritoneal fluid, cerebrospinal fluid and prostate secretions, as well as other tissues, homogenates, and extracts thereof. For assays employing polynucleotide probes or primers, a biological sample may be a total RNA, mRNA or cDNA preparation from any of the foregoing samples. Such biological samples may be prepared using any standard technique. Samples may be obtained from patients with or without a known cancer (as determined using standard clinical tests).

[0289] There are a variety of assay formats known to those of ordinary skill in the art for using a binding agent to detect a target molecule in a sample. See, e.g., Harlow and Lane, Antibodies: A Laboratory Manual, Cold Spring Harbor Laboratory, 1988. In general, the presence or absence of a cancer in a patient may be determined by (a) contacting a biological sample obtained from a patient with a binding agent; (b) detecting in the sample a level of polypeptide that binds to the binding agent; and (c) comparing the level of polypeptide with a predetermined cut-off value.

[0290] For example, an assay may be performed in a Western blot format, wherein a protein preparation from the biological sample is submitted to gel electrophoresis, transferred to a suitable membrane and allowed to react with an antibody binding agent. The antibody may be labeled, or the presence of the antibody on the membrane may be detected using a suitable detection reagent, as described below. A similar assay may be performed using a peptide binding agent comprising a CAR sequence. Such binding agents are generally labeled, as described below.

[0291] In a preferred embodiment, the assay involves the use of binding agent immobilized on a solid support to bind to a nonclassical cadherin, such as OB-cadherin or N-cadherin, or a proteolytic fragment thereof, and remove it from the remainder of the sample. The bound cadherin may then be detected using a second binding agent or other detection reagent that contains a reporter group and specifically binds to the binding agent/polypeptide complex. Such detection reagents may comprise, for example, a binding agent that specifically binds to a nonclassical cadherin such as OB-cadherin or N-cadherin. Alternatively, a competitive assay may be utilized, in which a nonclassical cadherin, or a portion thereof, is labeled with a reporter group and allowed to bind to the immobilized binding agent after incubation of the binding agent with the sample. The extent to which components of the sample inhibit the binding of the labeled nonclassical cadherin to the binding agent is indicative of the reactivity of the sample with the immobilized binding agent, and as a result, indicative of the level of nonclassical cadherin in the sample.

[0292] The solid support may be any material known to those of ordinary skill in the art to which the binding agent may be attached, such as a test well in a microtiter plate, a nitrocellulose filter or another suitable membrane. Alternatively, the support may be a bead or disc, such as glass, fiberglass, latex or a plastic such as polystyrene or polyvinylchloride. A binding agent, such as an antibody or peptide, may be immobilized on the solid support using a variety of techniques known to those in the art, which are amply described in the patent and scientific literature.

[0293] In certain embodiments, the assay for detection of a nonclassical cadherin such as OB-cadherin or N-cadherin in a sample is a two-antibody sandwich assay. This assay may be performed by first contacting an antibody that has been immobilized on a solid support, commonly the well of a microtiter plate, with the biological sample, such that nonclassical cadherin within the sample is allowed to bind to the immobilized antibody (a 30 minute incubation time at room temperature is generally sufficient). Unbound sample is then removed from the immobilized cadherin-antibody complexes and a second antibody (containing a reporter group such as an enzyme (such as horseradish peroxidase), substrate, cofactor, inhibitor, dye, radionuclide, luminescent group, fluorescent group or biotin) capable of binding to a different site on the cadherin is added. The conjugation of antibody to reporter group may be achieved using standard methods known to those of ordinary skill in the art. The amount of second antibody that remains bound to the solid support is then determined using a method appropriate for the specific reporter group.

[0294] More specifically, once an antibody is immobilized on the support as described above, the remaining protein binding sites on the support are typically blocked. Any suitable blocking agent known to those of ordinary skill in the art, such as bovine serum albumin or Tween 20™ (Sigma Chemical Co., St. Louis, Mo.). The immobilized antibody is then incubated with the sample, and polypeptides within the sample are allowed to bind to the antibody. The sample may be diluted with a suitable diluent, such as phosphate-buffered saline (PBS) prior to incubation. In general, an appropriate contact time (i.e., incubation time) is a period of time that is sufficient to detect the presence of nonclassical cadherin within a sample obtained from an individual with a metastatic cancer. Preferably, the contact time is sufficient to achieve a level of binding that is at least about 95% of that achieved at equilibrium between bound and unbound polypeptide. Those of ordinary skill in the art will recognize that the time necessary to achieve equilibrium may be readily determined by assaying the level of binding that occurs over a period of time. At room temperature, an incubation time of about 30 minutes is generally sufficient.

[0295] Unbound sample may then be removed by washing the solid support with an appropriate buffer, such as PBS containing 0.1% Tween 20™. The detection reagent is then incubated with the immobilized antibody-polypeptide complex for an amount of time sufficient to detect the bound polypeptide. An appropriate amount of time may generally be determined by assaying the level of binding that occurs over a period of time. Unbound detection reagent is then removed and bound detection reagent is detected using the reporter group. The method employed for detecting the reporter group depends upon the nature of the reporter group. For radioactive groups, scintillation counting or autoradiographic methods are generally appropriate. Spectroscopic methods may be used to detect dyes, luminescent groups and fluorescent groups. Biotin may be detected using avidin, coupled to a different reporter group (commonly a radioactive or fluorescent group or an enzyme). Enzyme reporter groups may generally be detected by the addition of substrate (generally for a specific period of time), followed by spectroscopic or other analysis of the reaction products. Standards and standard additions may be used to determine the level of nonclassical cadherin in a sample, using well known techniques.

[0296] To determine the presence or absence of a metastatic cancer, the signal detected from the reporter group that remains bound to the solid support is generally compared to a signal that corresponds to a predetermined cut-off value. In one preferred embodiment, the cut-off value for the detection of a metastatic cancer is the average mean signal obtained when the immobilized antibody is incubated with samples from patients without a detectable cancer. In general, a sample generating a signal that is statistically greater (preferably two fold greater) than the predetermined cut-off value is considered positive for a metastatic cancer. The precise cancer may be determined based on location of a tumor and/or using other clinically acceptable diagnostic techniques.

[0297] It will be apparent that numerous other assay protocols exist that are suitable for use with the antigens or binding agents of the present invention. For example, flow cytometry techniques may be applied, as described by Seline et al., J. Invest. Dermatol. 106:1320-1324, 1996. The above descriptions are intended to be exemplary only.

[0298] In another embodiment, binding agents may be used to monitor the progression of a cancer. In this embodiment, assays as described above for the diagnosis of a metastatic cancer may be performed over time, and the change in the level of reactive polypeptide(s) evaluated. In general, a cancer is progressing in those patients in whom the level of polypeptide detected by the binding agent increases over time. In contrast, the cancer is not progressing when the level of reactive polypeptide either remains constant or decreases with time.

[0299] Certain in vivo diagnostic assays may be performed directly on a tumor. One such assay involves contacting tumor cells with a binding agent. The bound binding agent may then be detected directly or indirectly via a reporter group. Such binding agents may also be used in histological applications. Samples suitable for immunocytochemical staining of OB-cadherin may be prepared by any of a variety of techniques. For example, frozen or paraffin-embedded tissue sections may be prepared as described by Byers et al., Endocrinology 134:630-639, 1994 and Cyr et al., Endocrinology 130:353-363, 1992, respectively, and placed on glass slides. Alternatively, cells obtained from sources such as peripheral blood or ascites fluid may be fixed onto glass slides as described by Blaschuk and Farookhi, Dev. Biol. 136:564-567, 1989. Samples may then be probed using an anti-nonclassical-cadherin antibody or labeled peptide comprising a CAR sequence, using standard techniques.

[0300] As noted above, a metastatic cancer may also, or alternatively, be detected based on the level of mRNA encoding a nonclassical cadherin in a biological sample. For example, at least two oligonucleotide primers may be employed in a polymerase chain reaction (PCR) based assay to amplify a portion of a nonclassical cadherin cDNA derived from a biological sample, wherein at least one of the oligonucleotide primers is specific for (i.e., hybridizes to) a polynucleotide encoding a nonclassical cadherin. The amplified cDNA is then separated and detected using techniques well known in the art, such as gel electrophoresis. Similarly, oligonucleotide probes that specifically hybridize to a polynucleotide encoding a nonclassical cadherin may be used in a hybridization assay to detect the presence of polynucleotide encoding the antigen in a biological sample.

[0301] To permit hybridization under assay conditions, oligonucleotide primers and probes should comprise an oligonucleotide sequence that has at least about 60%, preferably at least about 75% and more preferably at least about 90%, identity to a portion of a polynucleotide encoding a nonclassical cadherin that is at least 10 nucleotides, and preferably at least 20 nucleotides, in length. Oligonucleotide primers and/or probes which may be usefully employed in the diagnostic methods described herein preferably are at least 10-40 nucleotides in length. In a preferred embodiment, the oligonucleotide primers comprise at least 10 contiguous nucleotides, more preferably at least 15 contiguous nucleotides, of a DNA molecule encoding a nonclassical cadherin. Techniques for both PCR based assays and hybridization assays are well known in the art.

[0302] One preferred assay employs reverse transcriptase-polymerase chain reaction (RT-PCR), in which PCR is applied in conjunction with reverse transcription. Typically, RNA is extracted from a sample tissue using standard techniques (e.g., guanidine isothiocyanate extraction as described by Chomczynski and Sacchi, Anal. Biochem 162:156-159, 1987) and is reverse transcribed to produce cDNA molecules. This cDNA is then used as a template for a subsequent polymerase chain reaction. The cDNA is hybridized to sets of primers, at least one of which is specifically designed against a nonclassical cadherin such as an OB-cadherin or N-cadherin sequence. Examples of OB-cadherin primer sets include, but are not limited to: Forward 5′-ACCAGATGTCTGTATCAGA-3′ (SEQ ID NO: 5273) and Reverse 5′-GTCTCCTGGTCAT CATCTGCA-3′ (SEQ ID NO: 5274; Munro and Blaschuk, Biol. Reprod. 55:822-827, 1996); or Forward 5′-GCCAGACACAGTTCTTAAGG-3′ (SEQ ID NO: 5275) and Reverse 5′-ATCAAACCTGAGTATCAGTA-3′ (SEQ ID NO: 5276); Goomer et al., Calcif. Tissue Int. 62:532-537, 1998). Once primer and template have annealed, a DNA polymerase is employed to extend from the primer, thus synthesizing a copy of the template. The DNA strands are then denatured and the process is repeated numerous times until sufficient DNA is generated to allow visualization by ethidium bromide staining and agarose gel electrophoresis.

[0303] Amplification may be performed on samples obtained from biological samples taken from a test patient and an individual who is not afflicted with a metastatic cancer. The amplification reaction may be performed on several dilutions of cDNA spanning two orders of magnitude. A statistically significant (preferably at least two-fold) increase in expression in several dilutions of the test patient sample as compared to the same dilutions of the non-cancerous sample is typically considered positive for the presence of metastatic cancer. Polynucleotide probes may also be used within in vivo diagnostic assays performed directly on a tumor.

[0304] The present invention provides kits for use within any of the above diagnostic methods. Such kits typically comprise two or more components necessary for performing a diagnostic assay. Components may be compounds, reagents, containers and/or equipment. For example, one container within a kit may contain a binding agent as described herein. Such binding agents may be provided attached to a support material, as described above. One or more additional containers may enclose elements, such as reagents or buffers, to be used in the assay. Such kits may also, or alternatively, contain a detection reagent as described above that contains a reporter group suitable for direct or indirect detection of binding.

[0305] Alternatively, a kit may be designed to detect the level of mRNA encoding a nonclassical cadherin such as OB-cadherin or N-cadherin in a biological sample. Such kits generally comprise at least one oligonucleotide probe or primer, as described above, that hybridizes to a polynucleotide encoding a nonclassical cadherin. Such an oligonucleotide may be used, for example, within a PCR or hybridization assay. Additional components that may be present within such kits include a second oligonucleotide and/or a diagnostic reagent or container to facilitate the detection of a polynucleotide encoding a nonclassical cadherin.

[0306] The following examples are offered by way of illustration and not by way of limitation.

### EXAMPLES

### Example 1

### Preparation of Representative Modulating Agents

[0307] This Example illustrates the solid phase synthesis of representative peptide modulating agents.

[0308] The peptides were synthesized on a 431A Applied Biosystems peptide synthesizer using p-Hydroxymethylphenoxymethyl polystyrene (HMP) resin and standard Fmoc chemistry. After synthesis and deprotection, the peptides were de-salted on a Sephadex G-10 column and lyophilized. The peptides were analyzed for purity by analytical HPLC, and in each case a single peak was observed. Peptides were made as stock solutions at 10 to 25 mg/mL in dimethylsulfoxide (DMSO) or water and stored at −20° C. before use.

### Example 2

### Disruption of Human Breast Cancer Cell Adhesion

[0309] This Example illustrates the ability of a representative linear peptide comprising an OB-cadherin CAR sequence to disrupt human breast epithelial cell adhesion.

[0310] MDA-MB-231 human breast cancer cells (Lombardi Cancer Research Center, Washington, D.C.) were used in these experiments. They express cadherin-11 (also known as OB-cadherin) but not N-cadherin or E-cadherin. The cells were plated (˜50,000 cells) on glass coverslips and cultured for 24 hours in DMEM containing 5% serum. Peptides (N-Ac-IFVIDDKSG-NH₂ (SEQ ID NO:85) and H—IFVIDDKSG-OH (SEQ ID NO:85)) were dissolved in sterile water (10 mg/ml), and 100 μl of each peptide stock solution was added to 1 ml of DMEM containing 5% serum. Control cells had 100 μl of water added to the medium. Cells were monitored by phase contrast microscopy. After 24 hours cells were fixed in formaldehyde. After 24 hours, neither the peptide H-IFVIDDKSG-OH (SEQ ID NO:85) nor water had an effect on cell morphology (FIG. 5A). The cells treated with either water or H-IFVIDDKSG-OH (SEQ ID NO:85) remained flattened and well-attached to the substratum. In contrast, the cells treated with N-Ac-IFVIDDKSG-NH₂ (SEQ ID NO:85) rounded up from each other and were not well-attached to the substratum (FIGS. 5A and 5B; arrows indicate rounded cells). These results demonstrate that the peptide N-Ac-IFVIDDKSG-NH₂ (SEQ ID NO:85) interferes with cell adhesion. The amino acid sequence of this peptide is identical to that which is found in the first extracellular domain of OB-cadherin.

### Example 3

### Disruption of Endothelial Cell Adhesion Using Peptide Modulating Agents with a Cadherin-5 CAR Sequence

[0311] This Example illustrates the ability of a representative linear peptide comprising a cadherin-5 CAR sequence to disrupt endothelial cell adhesion.

[0312] Human umbilical vein endothelial cells were cultured using standard procedures (see Ichikawa et al., Amer. J. Physiol. 273 (Gastrointest. Liver Physiol. 36):3642-6347, 1997). Cells were maintained in EGM (Clonetics, San Diego, Calif.) and used at P2 for all experiments. Endothelial identity was established by Dil-LDL and factor VIII staining.

[0313] The cells were cultured on glass coverslips. Monolayers were exposed to peptides at a concentration of 75 μg/mL for 60 minutes. The cells were then fixed with 95% ethanol for 30 minutes at 4° C., followed by acetone for one minute and left to air dry at room temperature. Primary antibody for VE-cadherin (Immunotech, Marseilles, France; 1:250) was added for one hour at 37° C. Coverslips were then washed with 0.1% milk/PBS solution three times for five minutes each. Secondary antibody (1:250), goat anti-rabbit FITC (Zymed, San Francisco, Calif.) was incubated at 37° C. for one hour. Coverslips were again washed with 0.1% milk/PBS solution three times for five minutes each. Coverslips were mounted with anti-quenching solution (1 mg/mL phenylenediamine (Sigma, St. Louis, Mo.) in 50% glycerol, 50% PBS). All photographs were taken at 400× and 1000× with exposure times of 12 seconds.

[0314] The resulting photographs are presented in FIGS. 6A-6F. FIGS. 6A and 6B are control cells. The cells in FIGS. 6C and 6D were exposed to 75 μg/mL of H-VFRVDAETGD-OH (SEQ ID NO:64) and the cells in FIGS. 6E and 6F were exposed to 75 μg/mL of the linear peptide modulating agent N-Ac-VFRVDAETGD-NH₂ (SEQ ID NO:64). These results indicate that the linear peptide modulating agent N-Ac-VFRVDAETGD-NH₂ (SEQ ID NO:64) disrupts endothelial cell adhesion, with an activity that is substantially greater that that of a similar peptide without the N- and C-terminal functional groups.

### Example 4

### Detection of OB-Cadherin in Metastatic Ovarian Tumor Cells

[0315] This Example illustrates the association between OB-cadherin expression and metastasis in ovarian carcinoma cells.

[0316] An RT-PCR approach was employed to assay the presence of OB-cadherin mRNA transcripts in two ovarian cancer cell lines: SKOV3 (a metastatic cell line) and OVCAR3 (a noninvasive cell line). The cDNA was synthesized from 1 □g of total RNA by M-MLV-Reverse Transcriptase (Gibco/BRL, Burlington, ON) using a random hexamer as a primer. PCR was performed using the contents of the first-strand reaction and the OB cadherin-specific primers and Taq polymerase (Boehringer Mannheim, Laval, Que., Canada). The OB-cadherin-specific primers used were:

(SEQ ID NO: 5273)

Forward 5′-ACCAGATGTCTGTATCAGA3′;
and

(SEQ ID NO: 5274)

Reverse 5′-GTCTCCTGGTCATCATCTGCA-3′

[0317] (Munro and Blaschuk, Biol. Reprod. 55:822-827, 1996). To confirm the quality of the RNA used, PCR was also performed using primers for the housekeeping gene, hypoxanthine phosphoribosyltransferase (HPRT). The HPRT-specific primers used were:

(SEQ ID NO: 5277)

Forward 5′-CCTGCTGGATTACATTAAAGCACTG-3′;
and

(SEQ ID NO: 5278)

Reverse 5′-GTCAAGGGCATATCCAACAACAAAC-3′

[0318] (Melton et al., Proc. Natl. Acad. Sci. USA 81:2147-2151, 1984). The cycling program was as follows: denaturation at 95° C. for 30 sec.; annealing at 58-60° C. for 45 sec.; polymerization at 72° C. for 1 min.; repeat for 30 cycles. All PCR reactions were performed in parallel with reactions containing no cDNA as a control for contamination of PCR reagents. Products were identified by agarose gel electrophoresis stained with ethidium bromide (Sambrook et al., Molecular Cloning: A Laboratory Manual, Cold Spring Harbor Laboratories, Cold Spring Harbor, N.Y., 1989).

[0319] The results are presented in FIG. 5, which shows RT-PCR products from SKOV3 (lane 1) and OVCAR3 (lane 2). The primers used are specific for OB-cadherin (OB-cad) and hypoxanthine phosphoribosyltransferase (HPRT) as indicated, with an expected PCR product of 745 bp and 352 bp, respectively. Products were stained with ethidium bromide and resolved by agarose gel electrophoresis, and were all of the expected size. The results indicate that OB-cadherin is expressed by metastatic ovarian cancer cells, and is not expressed by non-invasive ovarian cancer cells.

### Example 5

### Detection of OB-Cadherin in Leukemic Cells

[0320] This Example illustrates the expression of OB-cadherin in lymphocytes of leukemia patients.

[0321] The RT-PCR approach described in Example 2 was employed to assay the presence of OB-cadherin mRNA transcripts in lymphocytes extracted from patients with B-cell chronic lymphocytic leukemia (B-CLL). RT-PCR products (shown in FIG. 6) were generated from lymphocytes of a human B-CLL patient (lane 1) and mouse liver (lane 2). The primers used were specific for OB-cadherin (OB-cad, top panel) and hypoxanthine phosphoribosyltransferase (HPRT, bottom panel), with an expected PCR product of 745 bp and 352 bp, respectively. Products were stained with ethidium bromide and resolved by agarose gel electrophoresis, and were all of the expected size. The results indicate that lymphocytes of a leukemia patient express OB-cadherin.

### Example 6

### Expression of N-Cadherin in Metastatic Carcinoma Cells

[0322] This Example illustrates the correlation between N-cadherin and metastatic potential in ovarian carcinoma cell lines.

[0323] E-cadherin and N-cadherin expression was evaluated in a series of ovarian carcinoma cell lines, using the RT-PCR approach described above. The E-cadherin specific primer used were:

(SEQ ID NO: 5279)

Forward 5′-CCTTCCCCCAACACGTCCCCCC-3′;
and

(SEQ ID NO: 5280)

Reverse 5′-TCTCCACGTCCTTCTTCATC-3′

[0324] (Munro and Blaschuk, Biol. Reprod. 55:822-827, 1996).

[0325] The N-cadherin specific primers used were:

(SEQ ID NO: 5281)

Forward 5′-CAAGAGCTTGTCACAATCAGG-3′;
and

(SEQ ID NO: 5282)

Reverse 5′-CATTTGGATCATCCGCATC-3′

[0326] (Munro and Blaschuk, Biol. Reprod. 55:822-827, 1996).

[0327] Cell lines examined included OVCAR-3 (Hamilton et al., Cancer Research 43:5379-89,1983); SW626 (Ripamonti et al., Cancer Immunology, Immunotherapy 24:13-18, 1987); CaOV3, SKOV3 and HEY (Buick et al., Cancer Research 45:3668-76, 1985). These cells (except HEY) are also available from American Type Culture Collection (Manassas, Va.).

[0328] The results of these analyses are presented in Table I, below, in which detectable PCR product is indicated as a “+” and no detectable PCR product is indicated by a “−”.

TABLE I
N- and E-Cadherin Expression in Ovarian Carcinoma Cell Lines

| | | Differentiation Stage | Cadherin | |
|---|---|---|---|---|
| Cell Line | Phenotype | and Metastatic Potential | E | N |
| Normal | Epithelial | None | + | − |
| OVCAR-3 | Adenocarcinoma | Differentiated; low | + | − |
| | | metastatic | | |
| SW626 | Adenocarcinoma | Differentiated; low | + | − |
| | | metastatic | | |
| CaOV3 | Adenocarcinoma | | + | + |
| SKOV3 | Adenocarcinoma | Poor differentiation; | − | + |
| | | high metastatic | | |
| HEY | Adenocarcinoma | Poor differentiation; | − | + |
| | | high metastatic | | |

### Example 7

### Modulation of Cell Adhesion Using Peptides Comprising Desmosomal CAR Sequences

[0329] Fsk-7.1 mouse mammary epithelial cells (Runswick et al (2001) Nature Cell Biology 3 823-830) were cultured in DMEM-F12 growth media supplemented with 9.2 mM HEPES, 10 μg/mL insulin, 5 ng/mL epidermal growth factor, 100 i.u. penicillin, 100 μg/mL streptomycin and 2% fetal calf serum on reconstituted basement membrane (Kleinman (1986) Biochemistry 25 12-18) at a density of 3×10⁵ cells/cm². After incubation in the presence or absence of cadherin-modulating peptides for 24 hr, unattached cells were removed by rinsing with phosphate-buffered saline and remaining cells were photographed by phase contrast microscopy. Alveolar aggregates were quantified by assigning the cells in the photomicrographs into three cateogories: single cells, clusters less than or equal to 4 cells or aggregates containing more than 4 cells. In each experiment quantification was performed on 12 non-overlapping areas of the culture plate. Data from three separate experiments was pooled for statistical analysis.

[0330] Under these conditions cadherin-modulating peptides at a concentration of 2 mM prevented the formation of alveolar aggregates. Table 1 shows the percentage of cells that are in the categories of single cells or clusters less than or equal to 4 cells. A cadherin-modulating agent containing the desmoglein amino acid sequence H-LTGYALDSRG-OH (SEQ ID NO: 5283) or a cyclic peptide Ac-CRALC-NH2 (SEQ ID NO: 4236) directed to the desmoglein cell adhesion recognition sequence decreased the formation of alveolar aggregates when incubated in combination with a cadherin-modulating agent containing the desmocollin amino acid sequence H-LTAFATTPDG-OH (SEQ ID NO: 5284) or a cyclic peptide Ac-CYATC-NH2 (SEQ ID NO: 4683) or Ac-CFATC-NH2 (SEQ ID NO: 5009) or Ac-CYASC-NH2 (SEQ ID NO: 5156) that are directed to the desmocollin cell adhesion recognition sequence. The decreased aggregation is manifested as increased percentage of single cells and small clusters.

TABLE II
Percentages of cells scoring in the categories of
single cells or clusters less than or equal to 4
cells out of the total number of cell clusters.

| | | |
|---|---|---|
| | | % (single |
| | | cells + |
| Desmoglein | Desmocollin | clusters |
| Peptide | Peptide | <4 cells) |

| | | |
|---|---|---|
| none | none | 18.1 |
| | H-LTAFATTPDG-OH | 28.0 |
| | (SEQ ID NO: 5284) | |
| | Ac-CYATC-NH2 | 18.2 |
| | (SEQ ID NO: 4683 | |
| | Ac-CFATC-NH2 | 13.1 |
| | (SEQ ID NI: 5009) | |
| | Ac-CYASC-NH2 | 12.9 |
| | (SEQ ID NO: 5156) | |
| H-LTGYALDSRG-OH | none | 21.7 |
| (SEQ ID NO: 5283) | | |
| | H-LTAFATTPDG-OH | 36.5 |
| | (SEQ ID NOl 5284) | |
| | Ac-CYATC-NH2 | 58.6 |
| | (SEQ ID NO: 4683) | |
| | Ac-CFATC-NH2 | 39.5 |
| | (SEQ ID NO: 5009) | |
| | Ac-CYASC-NH2 | 57.2 |
| | (SEQ ID NO: 5156) | |
| Ac-CRALC-NH2 | none | 12.9 |
| (SEQ ID NO: 4236) | | |
| | Ac-CYATC-NH2 | 19.6 |
| | (SEQ ID NO: 4683) | |
| | Ac-CFATC-NH2 | 33.6 |
| | (SEQ ID NO: 5009) | |
| | Ac-CYASC-NH2 | 37.2 |
| | (SEQ ID NO: 5156) | |

[0331] All of the above U.S. patents, U.S. patent application publications, U.S. patent applications, foreign patents, foreign patent applications and non-patent publications referred to in this specification and/or listed in the Application Data Sheet, are incorporated herein by reference, in their entirety.

[0332] From the foregoing it will be appreciated that, although specific embodiments of the invention have been described herein for purposes of illustration, various modifications may be made without deviating from the spirit and scope of the invention. Accordingly, the invention is not limited except as by the appended claims.

1. A modulating agent that:
(a) comprises a nonclassical cadherin CAR sequence; and
(b) contains 3-16 amino acid residues linked by peptide bonds.

2. A modulating agent that:
(a) comprises at least five consecutive amino acid residues of a nonclassical cadherin CAR sequence having the formula:

| | |
|---|---|
| Aaa-Phe-Baa-Ile/Leu/Val-Asp/Asn/Glu-Caa-Daa-Ser/Thr/Asn-Gly | (SEQ ID NO:3) |

wherein Aaa, Baa, Caa and Daa are independently selected amino acid residues; Ile/Leu/Val is an amino acid that is selected from the group consisting of isoleucine, leucine and valine, Asp/Asn/Glu is an amino acid that is selected from the group consisting of aspartate, asparagine and glutamate; and Ser/Thr/Asn is an amino acid that is selected from the group consisting of serine, threonine and asparagine; and
(b) contains no more than 50 consecutive amino acid residues present within the nonclassical cadherin.

3. A modulating agent that:
(a) comprises a nonclassical cadherin CAR sequence having the formula:

| | |
|---|---|
| Aaa-Phe-Baa-Ile/Leu/Val-Asp/Asn/Glu-Caa-Daa-Ser/Thr/Asn-Gly | (SEQ ID NO:3) |

wherein Aaa, Baa, Caa and Daa are independently selected amino acid residues; Ile/Leu/Val is an amino acid that is selected from the group consisting of isoleucine, leucine and valine, Asp/Asn/Glu is an amino acid that is selected from the group consisting of aspartate, asparagine and glutamate; and Ser/Thr/Asn is an amino acid that is selected from the group consisting of serine, threonine or asparagine; and
(b) contains no more than 50 consecutive amino acid residues present within the nonclassical cadherin.

4. A modulating agent that:
(a) comprises at least nine consecutive amino acid residues of a nonclassical cadherin, wherein the nine consecutive amino acids comprise a nonclassical cadherin CAR sequence having the formula:

| | |
|---|---|
| Aaa-Phe-Baa-Ile/Leu/Val-Asp/Asn/Glu-Caa-Daa-Ser/Thr/Asn-Gly | (SEQ ID NO:3) |

wherein Aaa, Baa, Caa and Daa are independently selected amino acid residues; Ile/Leu/Val is an amino acid that is selected from the group consisting of isoleucine, leucine and valine, Asp/Asn/Glu is an amino acid that is selected from the group consisting of aspartate, asparagine and glutamate; and Ser/Thr/Asn is an amino acid that is selected from the group consisting of serine, threonine and asparagine; and
(b) contains no more than 50 consecutive amino acid residues present within the nonclassical cadherin.

5. A modulating agent according to any one of claims 2-4, wherein the agent is a peptide ranging in size from 3 to 50 amino acid residues.

6. A modulating agent according to any one of claims 1-4, wherein the agent is a peptide ranging in size from 4 to 16 amino acid residues.

7. A modulating agent according to any one of claims 1-4, wherein the CAR sequence is present within a cyclic peptide.

8. A modulating agent according to claim 7, wherein the cyclic peptide has the formula: [chemical structure]
wherein W is a tripeptide selected from the group consisting of EEY, DDK, EAQ, DAE, NEN, ESE, DSG, DEN, EPK, DAN, EEF, NDV, DET, DPK, DDT, DAN, DKF, DEL, DAD, NNK, DLV, NRD, DPS, NQK, NRN, NKD, EKD, ERD, DPV, DSV, DLY, DSN, DSS, DEK, NEK, RAL, YAL, YAT, FAT and YAS;
wherein X₁, and X₂ are optional, and if present, are independently selected from the group consisting of amino acid residues and combinations thereof in which the residues are linked by peptide bonds, and wherein X₁ and X₂ independently range in size from 0 to 10 residues, such that the sum of residues contained within X₁ and X₂ ranges from 1 to 12;
wherein Y₁ and Y₂ are independently selected from the group consisting of amino acid residues, and wherein a covalent bond is formed between residues Y₁ and Y₂; and
wherein Z₁ and Z₂ are optional, and if present, are independently selected from the group consisting of amino acid residues and combinations thereof in which the residues are linked by peptide bonds.

9. A polynucleotide encoding a modulating agent according to any one of claims 1-4.

10. An expression vector comprising a polynucleotide according to claim 9.

11. A host cell transformed or transfected with an expression vector according to claim 10.

12. A modulating agent comprising an antibody or antigen-binding fragment thereof that specifically binds to a nonclassical cadherin CAR sequence and modulates a nonclassical cadherin-mediated function, wherein the nonclassical cadherin CAR sequence has the formula:

| | |
|---|---|
| Aaa-Phe-Baa-Ile/Leu/Val-Asp/Asn/Glu-Caa-Daa-Ser/Thr/Asn-Gly | (SEQ ID NO:3) |

wherein Aaa, Baa, Caa and Daa are independently selected amino acid residues; Ile/Leu/Val is an amino acid that is selected from the group consisting of isoleucine, leucine and valine, Asp/Asn/Glu is an amino acid that is selected from the group consisting of aspartate, asparagine and glutamate; and Ser/Thr/Asn is an amino acid that is selected from the group consisting of serine, threonine and asparagine; and
wherein the modulating agent inhibits or enhances a function mediated by the nonclassical cadherin.

13. A modulating agent comprising a mimetic of a nonclassical cadherin CAR sequence that comprises at least three consecutive amino acid residues of a nonclassical cadherin CAR sequence having the formula

| | |
|---|---|
| Aaa-Phe-Baa-Ile/Leu/Val-Asp/Asn/Glu-Caa-Daa-Ser/Thr/Asn-Gly | (SEQ ID NO:3) |

wherein Aaa, Baa, Caa and Daa are independently selected amino acid residues; Ile/Leu/Val is an amino acid that is selected from the group consisting of isoleucine, leucine and valine, Asp/Asn/Glu is an amino acid that is selected from the group consisting of aspartate, asparagine and glutamate; and Ser/Thr/Asn is an amino acid that is selected from the group consisting of serine, threonine and asparagine;
wherein the mimetic is capable of modulating a nonclassical cadherin-mediated function.

14. A modulating agent comprising a mimetic of a nonclassical cadherin CAR sequence that comprises at least five consecutive amino acid residues of a nonclassical cadherin CAR sequence having the formula

| | |
|---|---|
| Aaa-Phe-Baa-Ile/Leu/Val-Asp/Asn/Glu-Caa-Daa-Ser/Thr/Asn-Gly | (SEQ ID NO:3) |

wherein Aaa, Baa, Caa and Daa are independently selected amino acid residues; Ile/Leu/al is an amino acid that is selected from the group consisting of isoleucine, leucine and valine, Asp/Asn/Glu is an amino acid that is selected from the group consisting of aspartate, asparagine and glutamate; and Ser/Thr/Asn is an amino acid that is selected from the group consisting of serine, threonine and asparagine;
wherein the mimetic is capable of modulating a nonclassical cadherin-mediated function.

15. A modulating agent according to any one of claims 1-4, wherein the agent comprises one or more OB-cadherin CAR sequences selected from the group consisting DDK, IDDK (SEQ ID NO:4051) DDKS (SEQ ID NO:73), VIDDK (SEQ ID NO:74), IDDKS (SEQ ID NO:75), VIDDKS (SEQ ID NO:76), DDKSG (SEQ ID NO:77), IDDKSG (SEQ ID NO:78), VIDDKSG (SEQ ID NO:79), FVIDDK (SEQ ID NO:80), FVIDDKS (SEQ ID NO:81), FVIDDKSG (SEQ ID NO:82), IFVIDDK (SEQ ID NO:83), IFVIDDKS (SEQ ID NO:84), IFVIDDKSG (SEQ ID NO:85), EEY, IEEY (SEQ ID NO:86), EEYT (SEQ ID NO:87), VIEEY (SEQ ID NO:88), IEEYT (SEQ ID NO:89), VIEEYT (SEQ ID NO:90), EEYTG (SEQ ID NO:91), IEEYTG (SEQ ID NO:92), VIEEYTG (SEQ ID NO:93), FVIEEY (SEQ ID NO:94), FVIEEYT (SEQ ID NO:95), FVIEEYTG (SEQ ID NO:96), FFVIEEY (SEQ ID NO:97), FFVIEEYT (SEQ ID NO:98), FFVIEEYTG (SEQ ID NO:99), EAQ, VEAQ (SEQ ID NO:100), EAQT (SEQ ID NO:101), SVEAQ (SEQ ID NO:102), VEAQT (SEQ ID NO:103), SVEAQT (SEQ ID NO:104), EAQTG (SEQ ID NO:105), VEAQTG (SEQ ID NO:106), SVEAQTG (SEQ ID NO:107), FSVEAQ (SEQ ID NO:108), FSVEAQT (SEQ ID NO:109), FSVEAQTG (SEQ ID NO:110), YFSVEAQ (SEQ ID NO:111), YFSVEAQT (SEQ ID NO:112) and YFSVEAQTG (SEQ ID NO:113).

16. A modulating agent according to claim 15, wherein the agent comprises a linear peptide having the sequence N-Ac-IFVIDDKSG-NH₂ (SEQ ID NO:85), N-Ac-FFVIEEYTG-NH₂ (SEQ ID NO:99) or N-Ac-YFSVEAQTG-NH₂ (SEQ ID NO:113).

17. A modulating agent according to claim 15, wherein an OB-cadherin CAR sequence is present within a cyclic peptide.

18. A modulating agent according to claim 17, wherein the cyclic peptide comprises a sequence selected from the group consisting of CDDKC (SEQ ID NO₆₆₉), CIDDKC (SEQ ID NO:670), CDDKSC (SEQ ID NO:671), CVIDDKC (SEQ ID NO:672), CIDDKSC (SEQ ID NO:673), CVIDDKSC (SEQ ID NO:674), CDDKSGC (SEQ ID NO:675), CIDDKSGC (SEQ ID NO:676), CVIDDKSGC (SEQ ID NO:677), CFVIDDKC (SEQ ID NO:678), CFVIDDKSC (SEQ ID NO:679), CFVIDDKSGC (SEQ ID NO:680), CIFVIDDKC (SEQ ID NO:681), CIFVIDDKSC (SEQ ID NO:682), CIFVIDDKSGC (SEQ ID NO:683), DDDKK (SEQ ID NO:684), DIDDKK (SEQ ID NO:685), DVIDDKK (SEQ ID NO:686), DFVIDDKK (SEQ ID NO:687), DIFVIDDKK (SEQ ID NO:688), EDDKK (SEQ ID NO:689), EIDDKK (SEQ ID NO:690), EVIDDKK (SEQ ID NO:691), EFVIDDKK (SEQ ID NO:692), EIFVIDDKK (SEQ ID NO:693), FVIDDK (SEQ ID NO:694), FVIDDKS (SEQ ID NO:695), FVIDDKSG (SEQ ID NO:696), KDDKD (SEQ ID NO:697), KIDDKD (SEQ ID NO:698), KDDKSD (SEQ ID NO:699), KVIDDKD (SEQ ID NO:700), KIDDKSD (SEQ ID NO:701), KVIDDKSD (SEQ ID NO:702), KDDKSGD (SEQ ID NO:703), KIDDKSGD (SEQ ID NO:704), KVIDDKSGD (SEQ ID NO:705), KFVIDDKD (SEQ ID NO:706), KFVIDDKSD (SEQ ID NO:707), KFVIDDKSGD (SEQ ID NO:708), KIFVIDDKD (SEQ ID NO:709), KIFVIDDKSD (SEQ ID NO:710), KIFVIDDKSGD (SEQ ID NO:711), VIDDK (SEQ ID NO:712), IDDKS (SEQ ID NO:713), VIDDKS (SEQ ID NO:714), VIDDKSG (SEQ ID NO:715), DDKSG (SEQ ID NO:716), IDDKSG (SEQ ID NO:717), IFVIDDK (SEQ ID NO:718), IFVIDDKS (SEQ ID NO:719), IFVIDDKSG (SEQ ID NO:720), KDDKE (SEQ ID NO:721), KIDDKE (SEQ ID NO:722), KDDKSE (SEQ ID NO:723), KVIDDKE (SEQ ID NO:724), KIDDKSE (SEQ ID NO:725), KVIDDKSE (SEQ ID NO:726), KDDKSGE (SEQ ID NO:727), KIDDKSGE (SEQ ID NO:728), KVIDDKSGE (SEQ ID NO:729), KFVIDDKE (SEQ ID NO:730), KFVIDDKSE (SEQ ID NO:731), KFVIDDKSGE (SEQ ID NO:732), KIFVIDDKE (SEQ ID NO:733), KIFVIDDKSE (SEQ ID NO:734), KIFVIDDKSGE (SEQ ID NO:735), CEEYC (SEQ ID NO:736), CIEEYC (SEQ ID NO:737), CEEYTC (SEQ ID NO:738), CVIEEYC (SEQ ID NO:739), CIEEYTC (SEQ ID NO:740), CVIEEYTC (SEQ ID NO:741), CEEYTGC (SEQ ID NO:742), CIEEYTGC (SEQ ID NO:743), CVIEEYTGC (SEQ ID NO:744), CFVIEEYC (SEQ ID NO:745), CFVIEEYTC (SEQ ID NO:746), CFVIEEYTGC (SEQ ID NO:747), CFFVIEEYC (SEQ ID NO:748), CFFVIEEYTC (SEQ ID NO:749), CFFVIEEYTGC (SEQ ID NO:750), KEEYD (SEQ ID NO:751), KIEEYD (SEQ ID NO:752), KEEYTD (SEQ ID NO:753), KVIEEYD (SEQ ID NO:754), KIEEYTD (SEQ ID NO:755), KVIEEYTD (SEQ ID NO:756), KEEYTGCD (SEQ ID NO:757), KIEEYTGD (SEQ ID NO:758), KVIEEYTGD (SEQ ID NO:759), KFVIEEYD (SEQ ID NO:760), KFVIEEYTD (SEQ ID NO:761), KFVIEEYTGD (SEQ ID NO:762), KFFVIEEYD (SEQ ID NO:763), KFFVIEEYTD (SEQ ID NO:764), KFFVIEEYTGD (SEQ ID NO:765), EEEYK (SEQ ID NO:766), EIEEYK (SEQ ID NO:767), EEEYTK (SEQ ID NO:768), EVIEEYK (SEQ ID NO:769), EIEEYTK (SEQ ID NO:770), EVIEEYTK (SEQ ID NO:771), EEEYTGK (SEQ ID NO:772), EIEEYTGK (SEQ ID NO:773), EVIEEYTGK (SEQ ID NO:774), EFVIEEYK (SEQ ID NO:775), EFVIEEYTK (SEQ ID NO:776), EFVIEEYTGK (SEQ ID NO:777), EFFVIEEYK (SEQ ID NO:778), EFFVIEEYTK (SEQ ID NO:779), EFFVIEEYTGK (SEQ ID NO:780), DCEEYK (SEQ ID NO:781), DIEEYCK (SEQ ID NO:782), DEEYTK (SEQ ID NO:783), DVIEEYK (SEQ ID NO:784), DIEEYTK (SEQ ID NO:785), DVIEEYTK (SEQ ID NO:786), DEEYTGK (SEQ ID NO:787), DIEEYTGK (SEQ ID NO:788), DVIEEYTGK (SEQ ID NO:789), DFVIEEYK (SEQ ID NO:790), DFVIEEYTK (SEQ ID NO:791), DFVIEEYTGK (SEQ ID NO:792), DFFVIEEYK (SEQ ID NO:793), DFFVIEEYTK (SEQ ID NO:794), DFFVIEEYTGK (SEQ ID NO:795), KEEYE (SEQ ID NO:796), KIEEYE (SEQ ID NO:797), KEEYTE (SEQ ID NO:798), KVIEEYE (SEQ ID NO:799), KIEEYTE (SEQ ID NO:800), KVIEEYTE (SEQ ID NO:801), KEEYTGE (SEQ ID NO:802), KIEEYTGE (SEQ ID NO:803), KVIEEYTGE (SEQ ID NO:804), KFVIEEYE (SEQ ID NO:805), KFVIEEYTE (SEQ ID NO:806), KFVIEEYTGE (SEQ ID NO:807), KFFVIEEYE (SEQ ID NO:808), KFFVIEEYTE (SEQ ID NO:809), KFFVIEEYTGE (SEQ ID NO:810), VIEEY (SEQ ID NO:811), IEEYT (SEQ ID NO:812), VIEEYT (SEQ ID NO:813), EEYTG (SEQ ID NO:814), IEEYTG (SEQ ID NO:815), VIEEYTG (SEQ ID NO:816), FVIEEY (SEQ ID NO:817), FVIEEYT (SEQ ID NO:818), FVIEEYTG (SEQ ID NO:819), FFVIEEY (SEQ ID NO:820), FFVIEEYT (SEQ ID NO:821), FFVIEEYTG (SEQ ID NO:822), CEAQC (SEQ ID NO:823), CVEAQC (SEQ ID NO:824), CEAQTC (SEQ ID NO:825), CSVEAQC (SEQ ID NO:826), CVEAQTC (SEQ ID NO:827), CSVEAQTC (SEQ ID NO:828), CEAQTGC (SEQ ID NO:829), CVEAQTGC (SEQ ID NO:830), CSVEAQTGC (SEQ ID NO:831), CFSVEAQC (SEQ ID NO:832), CFSVEAQTC (SEQ ID NO:833), CFSVEAQTGC (SEQ ID NO:834), CYFSVEAQC (SEQ ID NO:835), CYFSVEAQTC (SEQ ID NO:836), CYFSVEAQTGC (SEQ ID NO:837), KEAQD (SEQ ID NO:838), KVEAQD (SEQ ID NO:839), KEAQTD (SEQ ID NO:840), KSVEAQD (SEQ ID NO:841), KVEAQTD (SEQ ID NO:842), KSVEAQTD (SEQ ID NO:843), KEAQTGD (SEQ ID NO:844), KVEAQTGD (SEQ ID NO:845), KSVEAQTGD (SEQ ID NO:846), KFSVEAQD (SEQ ID NO:847), KFSVEAQTD (SEQ ID NO:848), KFSVEAQTGD (SEQ ID NO:849), KYFSVEAQD (SEQ ID NO:850), KYFSVEAQTD (SEQ ID NO:851), KYFSVEAQTGD (SEQ ID NO:852), EEAQK (SEQ ID NO:853), EVEAQK (SEQ ID NO:854), EEAQTK (SEQ ID NO:855), ESVEAQK (SEQ ID NO:856), EVEAQTK (SEQ ID NO:857), ESVEAQTK (SEQ ID NO:858), EEAQTGK (SEQ ID NO:859), EVEAQTGK (SEQ ID NO:860), ESVEAQTGK (SEQ ID NO:861), EFSVEAQK (SEQ ID NO:862), EFSVEAQTK (SEQ ID NO:863), EFSVEAQTGK (SEQ ID NO:864), EYFSVEAQK (SEQ ID NO:865), EYFSVEAQTK (SEQ ID NO:866), EYFSVEAQTGK (SEQ ID NO:867), DEAQK (SEQ ID NO:868), DVEAQK (SEQ ID NO:869), DEAQTK (SEQ ID NO:870), DSVEAQK (SEQ ID NO:871), DVEAQTK (SEQ ID NO:872), DSVEAQTK (SEQ ID NO:873), DEAQTGK (SEQ ID NO:874), DVEAQTGK (SEQ ID NO:875), DSVEAQTGK (SEQ ID NO:876), DFSVEAQK (SEQ ID NO:877), DFSVEAQTK (SEQ ID NO:878), DFSVEAQTGK (SEQ ID NO:879), DYFSVEAQK (SEQ ID NO:880), DYFSVEAQTK (SEQ ID NO:881), DYFSVEAQTGK (SEQ ID NO:882), KEAQE (SEQ ID NO:883), KVEAQE (SEQ ID NO:884), KEAQTE (SEQ ID NO:885), KSVEAQE (SEQ ID NO:886), KVEAQTE (SEQ ID NO:887), KSVEAQTE (SEQ ID NO:888), KEAQTGE (SEQ ID NO:889), KVEAQTGE (SEQ ID NO:890), KSVEAQTGE (SEQ ID NO:891), KFSVEAQE (SEQ ID NO:892), KFSVEAQTE (SEQ ID NO:893), KFSVEAQTGE (SEQ ID NO:894), KYFSVEAQE (SEQ ID NO:895), KYFSVEAQTE (SEQ ID NO:896), KYFSVEAQTGE (SEQ ID NO:897), SVEAQ (SEQ ID NO:898), VEAQT (SEQ ID NO:899), SVEAQT (SEQ ID NO:900), EAQTG (SEQ ID NO:901), VEAQTG (SEQ ID NO:902), SVEAQTG (SEQ ID NO:903), FSVEAQ (SEQ ID NO:904), FSVEAQT (SEQ ID NO:905), FSVEAQTG (SEQ ID NO:906), YFSVEAQ (SEQ ID NO:907), YFSVEAQT (SEQ ID NO: 908) and YFSVEAQTG (SEQ ID NO:909).

19. A polynucleotide encoding a modulating agent according to claim 15.

20. A modulating agent comprising an antibody or antigen-binding fragment thereof that:
(a) specifically binds to an OB-cadherin CAR sequence selected from the group consisting of IFVIDDKSG (SEQ ID NO:85), FFVIEEYTG (SEQ ID NO:99) and YFSVEAQTG (SEQ ID NO:113) and
(b) modulates an OB-cadherin-mediated function.

21. A modulating agent according to any one of claims 1-4, wherein the agent comprises one or more cadherin-5 CAR sequences selected from the group consisting of DAE, VDAE (SEQ ID NO:114), DAET (SEQ ID NO:115), RVDAE (SEQ ID NO:116), VDAET (SEQ ID NO:117), RVDAET (SEQ ID NO:118), DAETG (SEQ ID NO:119), VDAETG (SEQ ID NO:120), RVDAETG (SEQ ID NO:121), FRVDAE (SEQ ID NO:122), FRVDAET (SEQ ID NO:123), FRVDAETG (SEQ ID NO:124), VFRVDAE (SEQ ID NO:125), VFRVDAET (SEQ ID NO:126) and VFRVDAETG (SEQ ID NO:127).

22. A modulating agent according to claim 21, wherein the agent comprises a linear peptide having the sequence N-Ac-VFRVDAETG-NH₂ (SEQ ID NO:127).

23. A modulating agent according to claim 21, wherein a cadherin-5 CAR sequence is present within a cyclic peptide.

24. A modulating agent according to claim 23, wherein the cyclic peptide comprises a sequence selected from the group consisting of CDAEC (SEQ ID NO:910), CVDAEC (SEQ ID NO:911), CDAETC (SEQ ID NO:912), CRVDAEC (SEQ ID NO:913), CVDAETC (SEQ ID NO:914), CRVDAETC (SEQ ID NO:915), CDAETGC (SEQ ID NO:916), CCDAETGC (SEQ ID NO:917), CRVDAETGC (SEQ ID NO:918), CFRVDAEC (SEQ ID NO:919), CFRVDAETC (SEQ ID NO:920), CFRVDAETGC (SEQ ID NO:921), CVFRVDAEC (SEQ ID NO:922), CVFRVDAETC (SEQ ID NO:923), CVFRVDAETGC (SEQ ID NO:924), DDAEK (SEQ ID NO:925), DVDAEK (SEQ ID NO:926), DRVDAEK (SEQ ID NO:927), DFRVDAEK (SEQ ID NO:928), DVFRVDAEK (SEQ ID NO:929), EDAEK (SEQ ID NO:930), EVDAEK (SEQ ID NO:931), ERVDAEK (SEQ ID NO:932), EFRVDAEK (SEQ ID NO:933), EVFRVDAEK (SEQ ID NO:934), KDAED (SEQ ID NO:935), KVDAED (SEQ ID NO:936), KDAETD (SEQ ID NO:937), KRVDAED (SEQ ID NO:938), KVDAETD (SEQ ID NO:939), KRVDAETD (SEQ ID NO:940), KDAETGD (SEQ ID NO:941), KVDAETGD (SEQ ID NO:942), KRVDAETGD (SEQ ID NO:943), KFRVDAED (SEQ ID NO:944), KFRVDAETD (SEQ ID NO:945), KFRVDAETGD (SEQ ID NO:946), KVFRVDAED (SEQ ID NO:947), KVFRVDAETD (SEQ ID NO:948), KVFRVDAETGD (SEQ ID NO:949), VDAEK (SEQ ID NO:950), IDAES (SEQ ID NO:951), VDAES (SEQ ID NO:952), DAETG (SEQ ID NO:953), VDAETG (SEQ ID NO:954), KDAEE (SEQ ID NO:955), KVDAE (SEQ ID NO:956), KDAETE (SEQ ID NO:957), KRVDAE (SEQ ID NO:958), KVDAETE (SEQ ID NO:959), KRVDAETE (SEQ ID NO:960), KDAETGE (SEQ ID NO:961), KVDAETGE (SEQ ID NO:962), KRVDAETGE (SEQ ID NO:962), KFRVDAE (SEQ ID NO:964), KFRVDAETE (SEQ ID NO:965), KFRVDAETGE (SEQ ID NO:966), KVFRVDAE (SEQ ID NO:967), KVFRVDAETE (SEQ ID NO:968), KVFRVDAETGE (SEQ ID NO:969), VDAET (SEQ ID NO:970), VDAETG (SEQ ID NO:971), DAETG (SEQ ID NO:972), RVDAE (SEQ ID NO:973), RVDAET (SEQ ID NO:974), RVDAETG (SEQ ID NO:975), FRVDAE (SEQ ID NO:976), FRVDAET (SEQ ID NO:977), FRVDAETG (SEQ ID NO:978), VFRVDAE (SEQ ID NO:979), VFRVDAET (SEQ ID NO:980) and VFRVDAETG (SEQ ID NO:981).

25. A polynucleotide encoding a modulating agent according to claim 21.

26. A modulating agent comprising an antibody or antigen-binding fragment thereof that:
(a) specifically binds to the cadherin-5 CAR sequence VFRVDAETG (SEQ ID NO:127); and
(b) modulates a cadherin-5-mediated function.

27. A modulating agent according to any one of claims 1-4, wherein the agent comprises one or more cadherin-6 CAR sequences selected from the group consisting NEN, INEN (SEQ ID NO128), NENT (SEQ ID NO:129), IINEN (SEQ ID NO:130), INENT (SEQ ID NO:131), IINENT (SEQ ID NO:132), NENTG (SEQ ID NO:133), INENTG (SEQ ID NO:134), IINENTG (SEQ ID NO:135), FIINEN (SEQ ID NO:136), FIINENT (SEQ ID NO:137), FIINENTG (SEQ ID NO:138), LFIINEN (SEQ ID NO:139), LFIINENT (SEQ ID NO:140), LFIINENTG (SEQ ID NO:141), EEY, EEYT (SEQ ID NO:142), EEYTG (SEQ ID NO:143), LEEY (SEQ ID NO:144), LEEYT (SEQ ID NO:145), LEEYTG (SEQ ID NO:146), LLEEY (SEQ ID NO:147), LLEEYTG (SEQ ID NO:148), FLLEEY (SEQ ID NO:149), FLLEEYT (SEQ ID NO:150), FLLEEYTG (SEQ ID NO:151), FFLLEEY (SEQ ID NO:152), FFLLEEYT (SEQ ID NO:153), FFLLEEYTG (SEQ ID NO:154), ESE, ESET (SEQ ID NO:155), ESETG (SEQ ID NO:156), VESE (SEQ ID NO:157), VSEST (SEQ ID NO:158), VESETG (SEQ ID NO:159), SVESE (SEQ ID NO:160), SVESET (SEQ ID NO:161), SVESETG (SEQ ID NO:162), FSVESE (SEQ ID NO:163), FSVESET (SEQ ID NO:164), FSVESETG (SEQ ID NO:165), YFSVESE (SEQ ID NO:166), YFSVESET (SEQ ID NO:167), YFSVESETG (SEQ ID NO:168), DSG, DSGN (SEQ ID NO:169), DSGNG (SEQ ID NO:170), IDSG (SEQ ID NO:171), IDSGN (SEQ ID NO:172), IDSGNG (SEQ ID NO:173), NIDSG (SEQ ID NO:174), NIDSGN (SEQ ID NO:175), NIDSGNG (SEQ ID NO:176), FNIDSG (SEQ ID NO:177), FNIDSGN (SEQ ID NO:178), FNIDSGNG (SEQ ID NO:179), IFNIDSG (SEQ ID NO:180), IFNIDSGN (SEQ ID NO:181) and IFNIDSGNG (SEQ ID NO:182).

28. A modulating agent according to claim 27, wherein the agent comprises a linear peptide having the sequence N-Ac-FFLLEEYTG-NH₂ (SEQ ID NO:154), N-Ac-LFIINENTG-NH₂ (SEQ ID NO:141), N-Ac-YFSVESETG-NH₂ (SEQ ID NO:168) or N-Ac-IFNIDSGNG-NH₂ (SEQ ID NO:182).

29. A modulating agent according to claim 27, wherein a cadherin-6 CAR sequence is present within a cyclic peptide.

30. A modulating agent according to claim 29, wherein the cyclic peptide comprises a sequence selected from the group consisting of: CNENC (SEQ ID NO:983), CINENC (SEQ ID NO:984), CNENTC (SEQ ID NO:985), CIINENC (SEQ ID NO:986), CINENTC (SEQ ID NO:987), CIINENTC (SEQ ID NO:988), CNENTGC (SEQ ID NO:989), CINENTGC (SEQ ID NO:990), CIINENTGC (SEQ ID NO:991), CFIINENC (SEQ ID NO:992), CFIINENTC (SEQ ID NO:993), CFIINENTGC (SEQ ID NO:994), CLFIINENC (SEQ ID NO:995), CLFIINENTC (SEQ ID NO:996), CLFIINENTGC (SEQ ID NO:997), DNENK (SEQ ID NO:998), DINENK (SEQ ID NO:999), DIINENK (SEQ ID NO:1000), DFIINENK (SEQ ID NO:1001), DLFIINENK (SEQ ID NO:1002), DNENTK (SEQ ID NO:982), DINENTK (SEQ ID NO:2883), DIINENTK (SEQ ID NO:2884), DFIINENTK (SEQ ID NO:2885), DLFIINENTK (SEQ ID NO:2946), DNENTGK (SEQ ID NO:2947), DINENTGK (SEQ ID NO:2948), DIINENTGK (SEQ ID NO:3009), DFIINENTGK (SEQ ID NO:3010), DLFIINENTGK (SEQ ID NO:3011), ENENTK (SEQ ID NO:3055), EINENTK (SEQ ID NO:3630), EIINENTK (SEQ ID NO:3736), EFIINENTK (SEQ ID NO:3842), ELFIINENTK (SEQ ID NO:3890), ENENTGK (SEQ ID NO:3891), EINENTGK (SEQ ID NO:3892), EIINENTGK (SEQ ID NO:3893), EFIINENTGK (SEQ ID NO:3894), ELFIINENTGK (SEQ ID NO:3895), ENENK (SEQ ID NO:1003), EINENK (SEQ ID NO:1004), EIINENK (SEQ ID NO:1005), EFIINENK (SEQ ID NO:1006), ELFIINENK (SEQ ID NO:1007), KNEND (SEQ ID NO:1008), KINEND (SEQ ID NO:1009), KNENTD (SEQ ID NO:1010), KIINEND (SEQ ID NO:1011), KINENTD (SEQ ID NO:1012), KIINENTD (SEQ ID NO:1013), KNENTGD (SEQ ID NO:1014), KINENTGD (SEQ ID NO:1015), KIINENTGD (SEQ ID NO:1016), KFIINEND (SEQ ID NO:1017), KFIINENTD (SEQ ID NO:1018), KFIINENTGD (SEQ ID NO:1019), KLFIINEND (SEQ ID NO:1020), KLFIINENTD (SEQ ID NO:1021), KLFIINENTGD (SEQ ID NO:1022), VNENT (SEQ ID NO:1023), INENT (SEQ ID NO:1024), IINENT (SEQ ID NO:1025), NENTG (SEQ ID NO:1026), INENTG (SEQ ID NO:1027) KNENE (SEQ ID NO:1028), KINENE (SEQ ID NO:1029), KNENTE (SEQ ID NO:1030), KIINENE (SEQ ID NO:1031), KINENTE (SEQ ID NO:1032), KIINENTE (SEQ ID NO:1033), KNENTGE (SEQ ID NO:1034), KINENTGE (SEQ ID NO:1035), KIINENTGE (SEQ ID NO:1036), KFIINENE (SEQ ID NO:1037), KFIINENTE (SEQ ID NO:1038), KFIINENTGE (SEQ ID NO:1039), KLFIINENE (SEQ ID NO:1040), KLFIINENTE (SEQ ID NO:1041), KLFIINENTGE (SEQ ID NO:1042), IINEN (SEQ ID NO:1043), FIINEN (SEQ ID NO:1044), FIINENT (SEQ ID NO:1045), FIINENTG (SEQ ID NO:1046), LFIINEN (SEQ ID NO:1047), LFIINENT (SEQ ID NO:1048), LFIINENTG (SEQ ID NO:1049), CEEYC (SEQ ID NO:1050), CEEYTC (SEQ ID NO:1051), CEEYTGC (SEQ ID NO:1052), CLEEYC (SEQ ID NO:1053), CLEEYTC (SEQ ID NO:1054), CLEEYTGC (SEQ ID NO:1055), CLLEEYC (SEQ ID NO:1056), CLLEEYTGC (SEQ ID NO:1057), CFLLEEYC (SEQ ID NO:1058), CLLEEYTC (SEQ ID NO:1059), CFLLEEYTGC (SEQ ID NO:1060), CFFLLEEYC (SEQ ID NO:1061), CFFLLEEYTC (SEQ ID NO:1062), CFFLLEEYTGC (SEQ ID NO:1063), CESEC (SEQ ID NO:1064), CESETC (SEQ ID NO:1065), CESETGC (SEQ ID NO:1066), CVESEC (SEQ ID NO:1067), CVSESTC (SEQ ID NO:1068), CVESETGC (SEQ ID NO:1069), CSVESEC (SEQ ID NO:1070), CSVESETC (SEQ ID NO:1071), CSVESETGC (SEQ ID NO:1072), CFSVESEC (SEQ ID NO:1073), CFSVESETC (SEQ ID NO:1074), CFSVESETGC (SEQ ID NO:1075), CYFSVESEC (SEQ ID NO:1076), CYFSVESETC (SEQ ID NO:1077), CYFSVESETGC (SEQ ID NO:1078), CDSGC (SEQ ID NO:1079), CDSGNC (SEQ ID NO:1080), CDSGNGC (SEQ ID NO:1081), CIDSGC (SEQ ID NO:1082), CIDSGNC (SEQ ID NO:1083), CIDSGNGC (SEQ ID NO:1084), CNIDSGC (SEQ ID NO:1085), CNIDSGNC (SEQ ID NO:1086), CNIDSGNGC (SEQ ID NO:1087), CFNIDSGC (SEQ ID NO:1088), CFNIDSGNC (SEQ ID NO:1089), CFNIDSGNGC (SEQ ID NO:1090), CIFNIDSGC (SEQ ID NO:1091), CIFNIDSGNC (SEQ ID NO:1092), CIFNIDSGNGC (SEQ ID NO:1093), KEEYD (SEQ ID NO:1094), KLEEYD (SEQ ID NO:1095), KEEYTD (SEQ ID NO:1096), KEEYTGD (SEQ ID NO:1097), KLEEYTD (SEQ ID NO:1098), KLEEYTGD (SEQ ID NO:1099), KLLEEYD (SEQ ID NO:1100), KLLEEYTGD (SEQ ID NO:1101), KFLLEEYD (SEQ ID NO:1102), KLLEEYTD (SEQ ID NO:1103), KFLLEEYTGD (SEQ ID NO:1104), KFFLLEEYD (SEQ ID NO:1105), KFFLLEEYTD (SEQ ID NO:1106), KFFLLEEYTGD (SEQ ID NO:1107), KESED (SEQ ID NO:1108), KESETD (SEQ ID NO:1109), KESETGD (SEQ ID NO:1110), KVESED (SEQ ID NO:1111), KVSESTD (SEQ ID NO:1112), KVESETGD (SEQ ID NO:1113), KSVESED (SEQ ID NO:1114), KSVESETD (SEQ ID NO:1115), KSVESETGD (SEQ ID NO:1116), KFSVESED (SEQ ID NO:1117), KFSVESETD (SEQ ID NO:1118), KFSVESETGD (SEQ ID NO:1119), KYFSVESED (SEQ ID NO:1120), KYFSVESETD (SEQ ID NO:1121), KYFSVESETGD (SEQ ID NO:1122), KDSGD (SEQ ID NO:1123), KDSGND (SEQ ID NO:1124), KDSGNGD (SEQ ID NO:1125), KIDSGD (SEQ ID NO:1126), KIDSGND (SEQ ID NO:1127), KIDSGNGD (SEQ ID NO:1128), KNIDSGD (SEQ ID NO:1129), KNIDSGND (SEQ ID NO:1130), KNIDSGNGD (SEQ ID NO:1131), KFNIDSGD (SEQ ID NO:1132), KFNIDSGND (SEQ ID NO:1133), KFNIDSGNGD (SEQ ID NO:1134), KIFNIDSGD (SEQ ID NO:1135), KIFNIDSGND (SEQ ID NO:1136), KIFNIDSGNGD (SEQ ID NO:1137), EEEYK (SEQ ID NO:1138), EEEYTK (SEQ ID NO:1139), EEEYTGK (SEQ ID NO:1140), ELEEYK (SEQ ID NO:1141), EEEYTK (SEQ ID NO:1142), ELEEYTGK (SEQ ID NO:1143), ELLEEYK (SEQ ID NO:1144), ELLEEYTGK (SEQ ID NO:1145), EFLLEEYK (SEQ ID NO:1146), ELLEEYTK (SEQ ID NO:1147), EFLLEEYTGK (SEQ ID NO:1148), EFFLLEEYK (SEQ ID NO:1149), EFFLLEEYTK (SEQ ID NO:1150), EFFLLEEYTGK (SEQ ID NO:1151), EESEK (SEQ ID NO:1152), EESETK (SEQ ID NO:1153), EESETGK (SEQ ID NO:1154), EVESEK (SEQ ID NO:1155), EVSESTK (SEQ ID NO:1156), EVESETGK (SEQ ID NO:1157), ESVESEK (SEQ ID NO:1158), ESVESETK (SEQ ID NO:1159), ESVESETGK (SEQ ID NO:1160), EFSVESEK (SEQ ID NO:1161), EFSVESETK (SEQ ID NO:1162), EFSVESETGK (SEQ ID NO:1163), EYFSVESEK (SEQ ID NO:1164), EYFSVESETK (SEQ ID NO:1165), EYFSVESETGK (SEQ ID NO:1166), EDSGK (SEQ ID NO:1167), EDSGNK (SEQ ID NO:1168), EDSGNGK (SEQ ID NO:1169), EIDSGK (SEQ ID NO:1170), EIDSGNK (SEQ ID NO:1171), EIDSGNGK (SEQ ID NO:1172), ENIDSGK (SEQ ID NO:1173), ENIDSGNK (SEQ ID NO:1174), ENIDSGNGK (SEQ ID NO:1175), EFNIDSGK (SEQ ID NO:1176), EFNIDSGNK (SEQ ID NO:1177), EFNIDSGNGK (SEQ ID NO:1178), EIFNIDSGK (SEQ ID NO:1179), EIFNIDSGNK (SEQ ID NO:1180), EIFNIDSGNGK (SEQ ID NO:1181), DEEYK (SEQ ID NO:1182), DLEEYK (SEQ ID NO:1183), DLEEYTK (SEQ ID NO:1184), DLEEYTGK (SEQ ID NO:1185), DLLEEYK (SEQ ID NO:1186), DLLEEYTGK (SEQ ID NO:1187), DFLLEEYK (SEQ ID NO:1188), DLLEEYTK (SEQ ID NO:1189), DFLLEEYTGK (SEQ ID NO:1190), DFFLLEEYK (SEQ ID NO:1191), DFFLLEEYTK (SEQ ID NO:1192), DFFLLEEYTGK (SEQ ID NO:1193), DESEK (SEQ ID NO:1194), DESETK (SEQ ID NO:1195), DESETGK (SEQ ID NO:1196), DVESEK (SEQ ID NO:1197), DVSESTK (SEQ ID NO:1198), DVESETGK (SEQ ID NO:1199), DSVESEK (SEQ ID NO:1200), DSVESETK (SEQ ID NO:1201), DSVESETGK (SEQ ID NO:1202), DFSVESEK (SEQ ID NO:1203), DFSVESETK (SEQ ID NO:1204), DFSVESETGK (SEQ ID NO:1205), DYFSVESEK (SEQ ID NO:1206), DYFSVESETK (SEQ ID NO:1207), DYFSVESETGK (SEQ ID NO:1208), DDSGK (SEQ ID NO:1209), DDSGNK (SEQ ID NO:1210), DDSGNGK (SEQ ID NO:1211), DIDSGK (SEQ ID NO:1212), DIDSGNK (SEQ ID NO:1213), DIDSGNGK (SEQ ID NO:1214), DNIDSGK (SEQ ID NO:1215), DNIDSGNK (SEQ ID NO:1216), DNIDSGNGK (SEQ ID NO:1217), DFNIDSGK (SEQ ID NO:1218), DFNIDSGNK (SEQ ID NO:1219), DFNIDSGNGK (SEQ ID NO:1220), DIFNIDSGK (SEQ ID NO:1221), DIFNIDSGNK (SEQ ID NO:1222), DIFNIDSGNGK (SEQ ID NO:1223), KEEYE (SEQ ID NO:1224), KLEEYE (SEQ ID NO:1225), KLEEYTE (SEQ ID NO:1226), KLEEYTGE (SEQ ID NO:1227), KLLEEYE (SEQ ID NO:1228), KLLEEYTGE (SEQ ID NO:1229), KFLLEEYE (SEQ ID NO:1230), KLLEEYTE (SEQ ID NO:1231), KFLLEEYTGE (SEQ ID NO:1232), KFFLLEEYE (SEQ ID NO:1233), KFFLLEEYTE (SEQ ID NO:1234), KFFLLEEYTGE (SEQ ID NO:1235), KNENE (SEQ ID NO:1236), KNENTE (SEQ ID NO:1237), KINENTGE (SEQ ID NO:1238), KESEE (SEQ ID NO:1239), KESETE (SEQ ID NO:1240), KESETGE (SEQ ID NO:1241), KVESEE (SEQ ID NO:1242) KVSESTE (SEQ ID NO:1243), KVESETGE (SEQ ID NO:1244), KSVESEE (SEQ ID NO:1245), KSVESETE (SEQ ID NO:1246), KSVESETGE (SEQ ID NO:1247), KFSVESEE (SEQ ID NO:1248), KFSVESETE (SEQ ID NO:1249), KFSVESETGE (SEQ ID NO:1250), KYFSVESEE (SEQ ID NO:1251), KYFSVESETE (SEQ ID NO:1252), KYFSVESETGE (SEQ ID NO:1253), KDSGE (SEQ ID NO:1254), KDSGNE (SEQ ID NO:1255), KDSGNGE (SEQ ID NO:1256), KIDSGE (SEQ ID NO:1257), KIDSGNE (SEQ ID NO:1258), KIDSGNGE (SEQ ID NO:1259), KNIDSGE (SEQ ID NO:1260), KNIDSGNE (SEQ ID NO:1261), KNIDSGNGE (SEQ ID NO:1262), KFNIDSGE (SEQ ID NO:1263), KFNIDSGNE (SEQ ID NO:1264), KFNIDSGNGE (SEQ ID NO:1265), KIFNIDSGE (SEQ ID NO:1266), KIFNIDSGNE (SEQ ID NO:1267), KIFNIDSGNGE (SEQ ID NO:1268), LEEYT (SEQ ID NO:1269), LEEYTG (SEQ ID NO:1270), LLEEY (SEQ ID NO:1271), LLEEYTG (SEQ ID NO:1272), FLLEEY (SEQ ID NO:1273), LLEEYT (SEQ ID NO:1274), FLLEEYTG (SEQ ID NO:1275), FFLLEEY (SEQ ID NO:1276), FFLLEEYT (SEQ ID NO:1277), FFLLEEYTG (SEQ ID NO:1278), ESETG (SEQ ID NO:1279), VSEST (SEQ ID NO:1280), VESETG (SEQ ID NO:1281), SVESE (SEQ ID NO:1282), SVESET (SEQ ID NO:1283), SVESETG (SEQ ID NO:1284), FSVESE (SEQ ID NO:1285), FSVESET (SEQ ID NO:1286), FSVESETG (SEQ ID NO:1287), YFSVESE (SEQ ID NO:1288), YFSVESET (SEQ ID NO:1289), YFSVESETG (SEQ ID NO:1290), DSGNG (SEQ ID NO:1291), IDSGN (SEQ ID NO:1292), IDSGNG (SEQ ID NO:1293), NIDSG (SEQ ID NO:1294), NIDSGN (SEQ ID NO:1295), NIDSGNG (SEQ ID NO:1296), FNIDSG (SEQ ID NO:1297), FNIDSGN (SEQ ID NO:1298), FNIDSGNG (SEQ ID NO:1299), IFNIDSG (SEQ ID NO:1300), IFNIDSGN (SEQ ID NO:1301) and IFNIDSGNG (SEQ ID NO:1302).

31. A polynucleotide encoding a modulating agent according to claim 27.

32. A modulating agent comprising an antibody or antigen-binding fragment thereof that:
(a) specifically binds to a cadherin-6 CAR sequence selected from the group consisting of FFLLEEYTG (SEQ ID NO:154), LFIINENTG (SEQ ID NO:141), YFSVESETG (SEQ ID NO:168) and IFNIDSGNG (SEQ ID NO:182); and
(b) modulates a cadherin-6-mediated function.

33. A modulating agent according to any one of claims 1-4, wherein the agent comprises one or more cadherin-7 CAR sequences selected from the group consisting of DEN, IDEN (SEQ ID NO:183), DENT (SEQ ID NO:184), IIDEN (SEQ ID NO:185), IDENT (SEQ ID NO:186), IIDENT (SEQ ID NO:187), DENTG (SEQ ID NO:188), IDENTG (SEQ ID NO:189), IIDENTG (SEQ ID NO:190), FIIDEN (SEQ ID NO:191), FIIDENT (SEQ ID NO:192), FIIDENTG (SEQ ID NO:193), IFIIDEN (SEQ ID NO:194), IFIIDENT (SEQ ID NO:195), IFIIDENTG (SEQ ID NO:196), EPK, EPKT (SEQ ID NO:197), EPKTG (SEQ ID NO:198), VEPK (SEQ ID NO:199), VEPKT (SEQ ID NO:200), VEPKTG (SEQ ID NO:201), SVEPK (SEQ ID NO:202), SVEPKT (SEQ ID NO:203), SVEPKTG (SEQ ID NO:204), FSVEPK (SEQ ID NO:205), FSVEPKT (SEQ ID NO:206), FSVEPKTG (SEQ ID NO:207), YFSVEPK (SEQ ID NO:208), YFSVEPKT (SEQ ID NO:209), YFSVEPKTG (SEQ ID NO:210), DAN, DANS (SEQ ID NO:211), DANSG (SEQ ID NO:212), IDAN (SEQ ID NO:213), IDANS (SEQ ID NO:214), IDANSG (SEQ ID NO:215), NIDAN (SEQ ID NO:216), NIDANS (SEQ ID NO:217), NIDANSG (SEQ ID NO:218), FNIDAN (SEQ ID NO:219), FNIDANS (SEQ ID NO:220), FNIDANSG (SEQ ID NO:221), YFNIDAN (SEQ ID NO:222), YFNIDANS (SEQ ID NO:223) and YFNIDANSG (SEQ ID NO:224).

34. A modulating agent according to claim 33, wherein the agent comprises a linear peptide having the sequence N-Ac-IFIIDENTG-NH₂ (SEQ ID NO:196), N-Ac-YFSVEPKTG-NH₂ (SEQ ID NO:210) or N-Ac-YFNIDANSG-NH₂ (SEQ ID NO:224).

35. A modulating agent according to claim 33, wherein a cadherin-7 CAR sequence is present within a cyclic peptide.

36. A modulating agent according to claim 35, wherein the cyclic peptide comprises a sequence selected from the group consisting of CDENC (SEQ ID NO:1303), CIDENC (SEQ ID NO:1304), CDENTC (SEQ ID NO:1305), CIIDENC (SEQ ID NO:1306), CIDENTC (SEQ ID NO:1307), CIIDENTC (SEQ ID NO:1308), CDENTGC (SEQ ID NO:1309), CIDENTGC (SEQ ID NO:1310), CIIDENTGC (SEQ ID NO:1311), CFIIDENC (SEQ ID NO:1312), CFIIDENTC (SEQ ID NO:1313), CFIIDENTGC (SEQ ID NO:1314), CIFIIDENC (SEQ ID NO:1315), CIFIIDENTC (SEQ ID NO:1316), CIFIIDENTGC (SEQ ID NO:1317), DDENK (SEQ ID NO:1319), DIDENK (SEQ ID NO:1320), DIIDENK (SEQ ID NO:1321), DFIIDENK (SEQ ID NO:1322), DIFIIDENK (SEQ ID NO:1323), DDENTK (SEQ ID NO:1318), DIDENTK (SEQ ID NO:1344), DIIDENTK (SEQ ID NO:3896), DFIIDENTK (SEQ ID NO:3897), DIFIIDENTK (SEQ ID NO:3898), DDENTGK (SEQ ID NO:3899), DIDENTGK (SEQ ID NO:3900), DIIDENTGK (SEQ ID NO:3901), DFIIDENTGK (SEQ ID NO:3902), DIFIIDENTGK (SEQ ID NO:3903), EDENTK (SEQ ID NO:3904), EIDENTK (SEQ ID NO:3905), EIIDENTK (SEQ ID NO:3906), EFIIDENTK (SEQ ID NO:3907), EIFIIDENTK (SEQ ID NO:3908), EDENTGK (SEQ ID NO:3909), EIDENTGK (SEQ ID NO:3910), EIIDENTGK (SEQ ID NO:3911), EFIIDENTGK (SEQ ID NO:3912), EIFIIDENTGK (SEQ ID NO:3913), EDENK (SEQ ID NO:1324), EIDENK (SEQ ID NO:1325), EIIDENK (SEQ ID NO:1326), EFIIDENK (SEQ ID NO:1327), EIFIIDENK (SEQ ID NO:1328), KDEND (SEQ ID NO:1329), KIDEND (SEQ ID NO:1330), KDENTD (SEQ ID NO:1331), KIIDEND (SEQ ID NO:1332), KIDENTD (SEQ ID NO:1333), KIIDENTD (SEQ ID NO:1334), KDENTGD (SEQ ID NO:1335), KIDENTGD (SEQ ID NO:1336), KIIDENTGD (SEQ ID NO:1337), KFIIDEND (SEQ ID NO:1338), KFIIDENTD (SEQ ID NO:1339), KFIIDENTGD (SEQ ID NO:1340), KIFIIDEND (SEQ ID NO:1341), KIFIIDENTD (SEQ ID NO:1342), KIFIIDENTGD (SEQ ID NO:1343), IDENT (SEQ ID NO:1345), IIDENT (SEQ ID NO:1346), DENTG (SEQ ID NO:1347), IDENTG (SEQ ID NO:1348) KDENE (SEQ ID NO:1349), KIDENE (SEQ ID NO:1350), KDENTE (SEQ ID NO:1351), KIIDENE (SEQ ID NO:1352), KIDENTE (SEQ ID NO:1353), KIIDENTE (SEQ ID NO:1354), KDENTGE (SEQ ID NO:1355), KIDENTGE (SEQ ID NO:1356), KIIDENTGE (SEQ ID NO:1357), KFIIDENE (SEQ ID NO:1358), KFIIDENTE (SEQ ID NO:1359), KFIIDENTGE (SEQ ID NO:1360), KIFIIDENE (SEQ ID NO:1361), KIFIIDENTE (SEQ ID NO:1362), KIFIIDENTGE (SEQ ID NO:1363), DDENTK (SEQ ID NO:1364), IIDEN (SEQ ID NO:1365), IIDENTG (SEQ ID NO:1366), FIIDEN (SEQ ID NO:1367), FIIDENT (SEQ ID NO:1368), FIIDENTG (SEQ ID NO:1369), IFIIDEN (SEQ ID NO:1370), IFIIDENT (SEQ ID NO:1371), IFIIDENTG (SEQ ID NO:1372), CEPKC (SEQ ID NO:1373), CEPKTC (SEQ ID NO:1374), CEPKTGC (SEQ ID NO:1375), CVEPKC (SEQ ID NO:1376), CVEPKTC (SEQ ID NO:1377), CVEPKTGC (SEQ ID NO:1378), CSVEPKC (SEQ ID NO:1379), CSVEPKTC (SEQ ID NO:1380), CSVEPKTGC (SEQ ID NO:1381), CFSVEPKC (SEQ ID NO:1382), CFSVEPKTC (SEQ ID NO:1383), CFSVEPKTGC (SEQ ID NO:1384), CYFSVEPKC (SEQ ID NO:1385), CYFSVEPKTC (SEQ ID NO:1386), CYFSVEPKTGC (SEQ ID NO:1387), CDANC (SEQ ID NO:1388), CDANSC (SEQ ID NO:1389), CDANSGC (SEQ ID NO:1390), CIDANC (SEQ ID NO:1391), CIDANSC (SEQ ID NO:1392), CIDANSGC (SEQ ID NO:1393), CNIDANC (SEQ ID NO:1394), CNIDANSC (SEQ ID NO:1395), CNIDANSGC (SEQ ID NO:1396), CFNIDANC (SEQ ID NO:1397), CFNIDANSC (SEQ ID NO:1398), CFNIDANSGC (SEQ ID NO:1399), CYFNIDANC (SEQ ID NO:1400), CYFNIDANSC (SEQ ID NO:1401), CYFNIDANSGC (SEQ ID NO:1402), EEPKK (SEQ ID NO:1403), EEPKTK (SEQ ID NO:1404), EEPKTGK (SEQ ID NO:1405), EVEPKK (SEQ ID NO:1406), EVEPKTK (SEQ ID NO:1407), EVEPKTGK (SEQ ID NO:1408), ESVEPKK (SEQ ID NO:1409), ESVEPKTK (SEQ ID NO:1410), ESVEPKTGK (SEQ ID NO:1411), EFSVEPKK (SEQ ID NO:1412), EFSVEPKTK (SEQ ID NO:1413), EFSVEPKTGK (SEQ ID NO:1414), EYFSVEPKK (SEQ ID NO:1415), EYFSVEPKTK (SEQ ID NO:1416), EYFSVEPKTGK (SEQ ID NO:1417), EDANK (SEQ ID NO:1418), EDANSK (SEQ ID NO:1419), EDANSGK (SEQ ID NO:1420), EIDANK (SEQ ID NO:1421), EIDANSK (SEQ ID NO:1422), EIDANSGK (SEQ ID NO:1423), ENIDANK (SEQ ID NO:1424), ENIDANSK (SEQ ID NO:1425), ENIDANSGK (SEQ ID NO:1426), EFNIDANK (SEQ ID NO:1427), EFNIDANSK (SEQ ID NO:1428), EFNIDANSGK (SEQ ID NO:1429), EYFNIDANK (SEQ ID NO:1430), EYFNIDANSK (SEQ ID NO:1431), EYFNIDANSGK (SEQ ID NO:1432), KDAND (SEQ ID NO:1433), KIDAND (SEQ ID NO:1434), KDANSD (SEQ ID NO:1435), KNIDAND (SEQ ID NO:1436), KIDANSD (SEQ ID NO:1437), KNIDANSD (SEQ ID NO:1438), KDANSGD (SEQ ID NO:1439), KIDANSGD (SEQ ID NO:1440), KNIDANSGD (SEQ ID NO:1441), KFNIDAND (SEQ ID NO:1442), KFNIDANSD (SEQ ID NO:1443), KFNIDANSGD (SEQ ID NO:1444), KYFNIDAND (SEQ ID NO:1445), KYFNIDANSD (SEQ ID NO:1446), KYFNIDANSGD (SEQ ID NO:1447), KEPKD (SEQ ID NO:1448), KEPKTD (SEQ ID NO:1449), KEPKTGD (SEQ ID NO:1450), KVEPKD (SEQ ID NO:1451), KVEPKTD (SEQ ID NO:1452), KVEPKTGD (SEQ ID NO:1453), KSVEPKD (SEQ ID NO:1454), KSVEPKTD (SEQ ID NO:1455), KSVEPKTGD (SEQ ID NO:1456), KFSVEPKD (SEQ ID NO:1457), KFSVEPKTD (SEQ ID NO:1458), KFSVEPKTGD (SEQ ID NO:1459), KYFSVEPKD (SEQ ID NO:1460), KYFSVEPKTD (SEQ ID NO:1461), KYFSVEPKTGD (SEQ ID NO:1462), KDAND (SEQ ID NO:1463), KDANSD (SEQ ID NO:1464), KDANSGD (SEQ ID NO:1465), KIDAND (SEQ ID NO:1466), KIDANSD (SEQ ID NO:1467), KIDANSGD (SEQ ID NO:1468), KNIDAND (SEQ ID NO:1469), KNIDANSD (SEQ ID NO:1470), KNIDANSGD (SEQ ID NO:1471), KFNIDAND (SEQ ID NO:1472), KFNIDANSD (SEQ ID NO:1473), KFNIDANSGD (SEQ ID NO:1474), KYFNIDAND (SEQ ID NO:1475), KYFNIDANSD (SEQ ID NO:1476), KYFNIDANSGD (SEQ ID NO:1477), DEPKK (SEQ ID NO:1478), DEPKTK (SEQ ID NO:1479), DEPKTGK (SEQ ID NO:1480), DVEPKK (SEQ ID NO:1481), DVEPKTK (SEQ ID NO:1482), DVEPKTGK (SEQ ID NO:1483), DSVEPKK (SEQ ID NO:1484), DSVEPKTK (SEQ ID NO:1485), DSVEPKTGK (SEQ ID NO:1486), DFSVEPKK (SEQ ID NO:1487), DFSVEPKTK (SEQ ID NO:1488), DFSVEPKTGK (SEQ ID NO:1489), DYFSVEPKK (SEQ ID NO:1490), DYFSVEPKTK (SEQ ID NO:1491), DYFSVEPKTGK (SEQ ID NO:1492), DDANK (SEQ ID NO:1493), DDANSK (SEQ ID NO:1494), DDANSGK (SEQ ID NO:1495), DIDANK (SEQ ID NO:1496), DIDANSK (SEQ ID NO:1497), DIDANSGK (SEQ ID NO:1498), DNIDANK (SEQ ID NO:1499), DNIDANSK (SEQ ID NO:1500), DNIDANSGK (SEQ ID NO:1501), DFNIDANK (SEQ ID NO:1502), DFNIDANSK (SEQ ID NO:1503), DFNIDANSGK (SEQ ID NO:1504), DYFNIDANK (SEQ ID NO:1505), DYFNIDANSK (SEQ ID NO:1506), DYFNIDANSGK (SEQ ID NO:1507), KDENE (SEQ ID NO:1508), KDENTE (SEQ ID NO:1509), KDENTGE (SEQ ID NO:1510), KIDENE (SEQ ID NO:1511), KIDENTE (SEQ ID NO:1512), KIDENTGE (SEQ ID NO:1513), KIIDENE (SEQ ID NO:1514), KIIDENTE (SEQ ID NO:1515), KIIDENTGE (SEQ ID NO:1516), KFIIDENE (SEQ ID NO:1517), KFIIDENTE (SEQ ID NO:1518), KFIIDENTGE (SEQ ID NO:1519), KIFIIDENE (SEQ ID NO:1520), KIFIIDENTE (SEQ ID NO:1521), KIFIIDENTGE (SEQ ID NO:1522), KEPKE (SEQ ID NO:1523), KEPKTE (SEQ ID NO:1524), KEPKTGE (SEQ ID NO:1525), KVEPKE (SEQ ID NO:1526), KVEPKTE (SEQ ID NO:1527), KVEPKTGE (SEQ ID NO:1528), KSVEPKE (SEQ ID NO:1529), KSVEPKTE (SEQ ID NO:1530), KSVEPKTGE (SEQ ID NO:1531), KFSVEPKE (SEQ ID NO:1532), KFSVEPKTE (SEQ ID NO:1533), KFSVEPKTGE (SEQ ID NO:1534), KYFSVEPKE (SEQ ID NO:1535), KYFSVEPKTE (SEQ ID NO:1536), KYFSVEPKTGE (SEQ ID NO:1537), KDANE (SEQ ID NO:1538), KDANSE (SEQ ID NO:1539), KDANSGE (SEQ ID NO:1540), KIDANE (SEQ ID NO:1541), KIDANSE (SEQ ID NO:1542), KIDANSGE (SEQ ID NO:1543), KNIDANE (SEQ ID NO:1544), KNIDANSE (SEQ ID NO:1545), KNIDANSGE (SEQ ID NO:1546), KFNIDANE (SEQ ID NO:1547), KFNIDANSE (SEQ ID NO:1548), KFNIDANSGE (SEQ ID NO:1549), KYFNIDANE (SEQ ID NO:1550), KYFNIDANSE (SEQ ID NO:1551), KYFNIDANSGE (SEQ ID NO:1552), DENTG (SEQ ID NO:1553), IDENT (SEQ ID NO:1554), IDENTG (SEQ ID NO:1555), IIDEN (SEQ ID NO:1556), IIDENT (SEQ ID NO:1557), IIDENTG (SEQ ID NO:1558), FIIDEN (SEQ ID NO:1559), FIIDENT (SEQ ID NO:1560), FIIDENTG (SEQ ID NO:1561), IFIIDEN (SEQ ID NO:1562), IFIIDENT (SEQ ID NO:1563), IFIIDENTG (SEQ ID NO:1564), EPKTG (SEQ ID NO:1565), VEPKT (SEQ ID NO:1566), VEPKTG (SEQ ID NO:1567), SVEPK (SEQ ID NO:1568), SVEPKT (SEQ ID NO:1569), SVEPKTG (SEQ ID NO:1570), FSVEPK (SEQ ID NO:1571), FSVEPKT (SEQ ID NO:1572), FSVEPKTG (SEQ ID NO:1573), YFSVEPK (SEQ ID NO:1574), YFSVEPKT (SEQ ID NO:1575), YFSVEPKTG (SEQ ID NO:1576), DANSG (SEQ ID NO:1577), IDANS (SEQ ID NO:1578), IDANSG (SEQ ID NO:1579), NIDAN (SEQ ID NO:1580), NIDANS (SEQ ID NO:1581), NIDANSG (SEQ ID NO:1582), FNIDAN (SEQ ID NO:1583), FNIDANS (SEQ ID NO:1584), FNIDANSG (SEQ ID NO:1585), YFNIDAN (SEQ ID NO:1586), YFNIDANS (SEQ ID NO:1587) and YFNIDANSG (SEQ ID NO:1588).

37. A polynucleotide encoding a modulating agent according to claim 33.

38. A modulating agent comprising an antibody or antigen-binding fragment thereof that:
(a) specifically binds to a cadherin-7 CAR sequence selected from the group consisting of IFIIDENTG (SEQ ID NO:196), YFSVEPKTG (SEQ ID NO:210) and YFNIDANSG (SEQ ID NO:224); and
(b) modulates a cadherin-7-mediated function.

39. A modulating agent according to any one of claims 1-4, wherein the agent comprises one or more cadherin-8 CAR sequences selected from the group consisting NDV, INDV (SEQ ID NO:225), NDVT (SEQ ID NO:226), QINDV (SEQ ID NO:227), INDVT (SEQ ID NO:228), QINDVT (SEQ ID NO:229), NDVTG (SEQ ID NO:230), INDVTG (SEQ ID NO:231), QINDVTG (SEQ ID NO:232), FQINDV (SEQ ID NO:233), FQINDVT (SEQ ID NO:234), FQINDVTG (SEQ ID NO:235), IFQINDV (SEQ ID NO:236), IFQINDVT (SEQ ID NO:237), IFQINDVTG (SEQ ID NO:238), EEF, EEFS (SEQ ID NO:239), EEFSG (SEQ ID NO:240), LEEF (SEQ ID NO:241), LEEFS (SEQ ID NO:242), LEEFSG (SEQ ID NO:243), VLEEF (SEQ ID NO:244), VLEEFS (SEQ ID NO:245), VLEEFSG (SEQ ID NO:247), FVLEEF (SEQ ID NO:247), FVLEEFS (SEQ ID NO:248), FVLEEFSG (SEQ ID NO:249), MFVLEEF (SEQ ID NO:250), MFVLEEFS (SEQ ID NO:251) and MFVLEEFSG (SEQ ID NO:252).

40. A modulating agent according to claim 39, wherein the agent comprises a linear peptide having the sequence N-Ac-MFVLEEFSG-NH₂ (SEQ ID NO:252) or N-Ac-IFQINDVTG-NH₂ (SEQ ID NO:238).

41. A modulating agent according to claim 39, wherein a cadherin-8 CAR sequence is present within a cyclic peptide.

42. A modulating agent according to claim 41, wherein the cyclic peptide comprises a sequence selected from the group consisting of CNDVC (SEQ ID NO:1589), CINDVC (SEQ ID NO:1590), CNDVTC (SEQ ID NO:1591), CQINDVC (SEQ ID NO:1592), CINDVTC (SEQ ID NO:1593), CQINDVTC (SEQ ID NO:1594), CNDVTGC (SEQ ID NO:1595), CINDVTGC (SEQ ID NO:1596), CQINDVTGC (SEQ ID NO:1597), CFQINDVC (SEQ ID NO:1598), CFQINDVTC (SEQ ID NO:1599), CFQINDVTGC (SEQ ID NO:1600), CIFQINDVC (SEQ ID NO:1601), CIFQINDVTC (SEQ ID NO:1602), CIFQINDVTGC (SEQ ID NO:1603), DNDVK (SEQ ID NO:1604), DINDVK (SEQ ID NO:1605), DQINDVK (SEQ ID NO:1606), DFQINDVK (SEQ ID NO:1607), DIFQINDVK (SEQ ID NO:1608), DNDVTK (SEQ ID NO:3924), DINDVTK (SEQ ID NO:3925), DQINDVTK (SEQ ID NO:3926), DFQINDVTK (SEQ ID NO:3927), DIFQINDVTK (SEQ ID NO:3928), DNDVTGK (SEQ ID NO:3929), DINDVTGK (SEQ ID NO:3930), DQINDVTGK (SEQ ID NO:3931), DFQINDVTGK (SEQ ID NO:3932), DIFQINDVTGK (SEQ ID NO:3933), ENDVTK (SEQ ID NO:3914), EINDVTK (SEQ ID NO:3915), EQINDVTK (SEQ ID NO:3916), EFQINDVTK (SEQ ID NO:3917), EIFQINDVTK (SEQ ID NO:3918), ENDVTGK (SEQ ID NO:3919), EINDVTGK (SEQ ID NO:3920), EQINDVTGK (SEQ ID NO:3921), EFQINDVTGK (SEQ ID NO:3922), EIFQINDVTGK (SEQ ID NO:3923), ENDVK (SEQ ID NO:1609), EINDVK (SEQ ID NO:1610), EQINDVK (SEQ ID NO:1611), EFQINDVK (SEQ ID NO:1612), EIFQINDVK (SEQ ID NO:1613), KNDVD (SEQ ID NO:1614), KINDVD (SEQ ID NO:1615), KNDVTD (SEQ ID NO:1616), KQINDVD (SEQ ID NO:1617), KINDVTD (SEQ ID NO:1618), KQINDVTD (SEQ ID NO:1619), KNDVTGD (SEQ ID NO:1620), KINDVTGD (SEQ ID NO:1621), KQINDVTGD (SEQ ID NO:1622), KFQINDVD (SEQ ID NO:1623), KFQINDVTD (SEQ ID NO:1624), KFQINDVTGD (SEQ ID NO:1625), KIFQINDVD (SEQ ID NO:1626), KIFQINDVTD (SEQ ID NO:1627), KIFQINDVTGD (SEQ ID NO:1628), VNDVT (SEQ ID NO:1629), INDVT (SEQ ID NO:1630), QINDVT (SEQ ID NO:1631), NDVTG (SEQ ID NO:1632), INVTG (SEQ ID NO:1633) KNDVE (SEQ ID NO:1634), KINDVE (SEQ ID NO:1635), KNDVTE (SEQ ID NO:1636), KQINDVE (SEQ ID NO:1637), KINDVTE (SEQ ID NO:1638), KQINDVTE (SEQ ID NO:1639), KNDVTGE (SEQ ID NO:1640), KINDVTGE (SEQ ID NO:1641), KQINDVTGE (SEQ ID NO:1642), KFQINDVE (SEQ ID NO:1643), KFQINDVTE (SEQ ID NO:1644), KFQINDVTGE (SEQ ID NO:1645), KIFQINDVE (SEQ ID NO:1646), KIFQINDVTE (SEQ ID NO:1647), KIFQINDVTGE (SEQ ID NO:1648), CEEFC (SEQ ID NO:1649), CEEFSC (SEQ ID NO:1650), CEEFSGC (SEQ ID NO:1651), CLEEFC (SEQ ID NO:1652), CLEEFSC (SEQ ID NO:1653), CLEEFSGC (SEQ ID NO:1654), CVLEEFC (SEQ ID NO:1655), CVLEEFSC (SEQ ID NO:1656), CVLEEFSGC (SEQ ID NO:1657), CFVLEEFC (SEQ ID NO:1658), CFVLEEFSC (SEQ ID NO:1659), CFVLEEFSGC (SEQ ID NO:1660), CMFVLEEFC (SEQ ID NO:1661), CMFVLEEFSC (SEQ ID NO:1662), CMFVLEEFSGC (SEQ ID NO:1663), EEEFK (SEQ ID NO:1664), EEEFSK (SEQ ID NO:1665), EEEFSGK (SEQ ID NO:1666), ELEEFK (SEQ ID NO:1667), ELEEFSK (SEQ ID NO:1668), ELEEFSGK (SEQ ID NO:1669), EVLEEFK (SEQ ID NO:1670), EVLEEFSK (SEQ ID NO:1671), EVLEEFSGK (SEQ ID NO:1672), EFVLEEFK (SEQ ID NO:1673), EFVLEEFSK (SEQ ID NO:1674), EFVLEEFSGK (SEQ ID NO:1675), EMFVLEEFK (SEQ ID NO:1676) EMFVLEEFSK (SEQ ID NO:1677), EMFVLEEFSGK (SEQ ID NO:1678), KEEFD (SEQ ID NO:1679), KEEFSD (SEQ ID NO:1680), KEEFSGD (SEQ ID NO:1681), KLEEFD (SEQ ID NO:1682), KLEEFSD (SEQ ID NO:1683), KLEEFSGD (SEQ ID NO:1684), KVLEEFD (SEQ ID NO:1685), KVLEEFSD (SEQ ID NO:1686), KVLEEFSGD (SEQ ID NO:1687), KFVLEEFD (SEQ ID NO:1688), KFVLEEFSD (SEQ ID NO:1689), KFVLEEFSGD (SEQ ID NO:1690), KMFVLEEFD (SEQ ID NO:1691), KMFVLEEFSD (SEQ ID NO:1692), KMFVLEEFSGD (SEQ ID NO:1693), DEEFK (SEQ ID NO:1694), DEEFSK (SEQ ID NO:1695), DEEFSGK (SEQ ID NO:1696), DLEEFK (SEQ ID NO:1697), DLEEFSK (SEQ ID NO:1698), DLEEFSGK (SEQ ID NO:1699), DVLEEFK (SEQ ID NO:1700), DVLEEFSK (SEQ ID NO:1701), DVLEEFSGK (SEQ ID NO:1702), DFVLEEFK (SEQ ID NO:1703), DFVLEEFSK (SEQ ID NO:1704), DFVLEEFSGK (SEQ ID NO:1705), DMFVLEEFK (SEQ ID NO:1706), DMFVLEEFSK (SEQ ID NO:1707), DMFVLEEFSGK (SEQ ID NO:1708), KEEFE (SEQ ID NO:1709), KEEFSE (SEQ ID NO:1710), KEEFSGE (SEQ ID NO:1711), KLEEFE (SEQ ID NO:1712), KLEEFSE (SEQ ID NO:1713), KLEEFSGE (SEQ ID NO:1714), KVLEEFE (SEQ ID NO:1715), KVLEEFSE (SEQ ID NO:1716), KVLEEFSGE (SEQ ID NO:1717), KFVLEEFE (SEQ ID NO:1718), KFVLEEFSE (SEQ ID NO:1719), KFVLEEFSGE (SEQ ID NO:1720), KMFVLEEFE (SEQ ID NO:1721), KMFVLEEFSE (SEQ ID NO:1722), KMFVLEEFSGE (SEQ ID NO:1723), EEFSG (SEQ ID NO:1724), LEEFS (SEQ ID NO:1725), LEEFSG (SEQ ID NO:1726), VLEEF (SEQ ID NO:1727), VLEEFS (SEQ ID NO:1728), VLEEFSG (SEQ ID NO:1729), FVLEEF (SEQ ID NO:1730), FVLEEFS (SEQ ID NO:1731), FVLEEFSG (SEQ ID NO:1732), MFVLEEF (SEQ ID NO:1733), MFVLEEFS (SEQ ID NO:1734) and MFVLEEFSG (SEQ ID NO:1735).

43. A polynucleotide encoding a modulating agent according to claim 39.

44. A modulating agent comprising an antibody or antigen-binding fragment thereof that:
(a) specifically binds to a cadherin-8 CAR sequence selected from the group consisting of MFVLEEFSG (SEQ ID NO:252) and IFQINDVTG (SEQ ID NO:238); and
(b) modulates a cadherin-8-mediated function.

45. A modulating agent according to any one of claims 1-4, wherein the agent comprises one or more cadherin-12 CAR sequences selected from the group consisting of DET, IDET (SEQ ID NO:253), DETT (SEQ ID NO:254), TIDET (SEQ ID NO:255), IDETT (SEQ ID NO:256), TIDETT (SEQ ID NO:257), DETTG (SEQ ID NO:258), IDETTG (SEQ ID NO:259), TIDETTG (SEQ ID NO:260), FTIDET (SEQ ID NO:261), FTIDETT (SEQ ID NO:262), FTIDETTG (SEQ ID NO:263), VFTIDET (SEQ ID NO:264), VFTIDETT (SEQ ID NO:265), VFTIDETTG (SEQ ID NO:266), DPK, DPKT (SEQ ID NO:267), DPKTG (SEQ ID NO:268), IDPK (SEQ ID NO:269), IDPKT (SEQ ID NO:270), IDPKTG (SEQ ID NO:271), SIDPK (SEQ ID NO:272), SIDPKT (SEQ ID NO:273), SIDPKTG (SEQ ID NO:274), FSIDPK (SEQ ID NO:275), FSIDPKT (SEQ ID NO:276), FSIDPKTG (SEQ ID NO:277), YFSIDPK (SEQ ID NO:278), YFSIDPKT (SEQ ID NO:279) and YFSIDPKTG (SEQ ID NO:280).

46. A modulating agent according to claim 45, wherein the agent comprises a linear peptide having the sequence N-Ac-VFTIDETTG-NH₂ (SEQ ID NO:266) or N-Ac-YFSIDPKTG-NH₂ (SEQ ID NO:280).

47. A modulating agent according to claim 45, wherein a cadherin-12 CAR sequence is present within a cyclic peptide.

48. A modulating agent according to claim 47, wherein the cyclic peptide comprises a sequence selected from the group consisting of CDETC (SEQ ID NO:1736), CIDETC (SEQ ID NO:1737), CDETTC (SEQ ID NO:1738), CTIDETC (SEQ ID NO:1739), CIDETTC (SEQ ID NO:1740), CTIDETTC (SEQ ID NO:1741), CDETTGC (SEQ ID NO:1742), CIDETTGC (SEQ ID NO:1743), CTIDETTGC (SEQ ID NO:1744), CFTIDETC (SEQ ID NO:1745), CFTIDETTC (SEQ ID NO:1746), CFTIDETTGC (SEQ ID NO:1747), CVFTIDETC (SEQ ID NO:1748), CVFTIDETTC (SEQ ID NO:1749), CVFTIDETTGC (SEQ ID NO:1750), DDETK (SEQ ID NO:1752), DIDETK (SEQ ID NO:1753), DTIDETK (SEQ ID NO:1754), DFTIDETK (SEQ ID NO:1755), DVFTIDETK (SEQ ID NO:1756), EDETK (SEQ ID NO:1757), EIDETK (SEQ ID NO:1758), ETIDETK (SEQ ID NO:1759), EFTIDETK (SEQ ID NO:1760), EVFTIDETK (SEQ ID NO:1761), KDETD (SEQ ID NO:1762), KIDETD (SEQ ID NO:1763), KDETTD (SEQ ID NO:1764), KTIDETD (SEQ ID NO:1765), KIDETTD (SEQ ID NO:1766), KTIDETTD (SEQ ID NO:1767), KDETTGD (SEQ ID NO:1768), KIDETTGD (SEQ ID NO:1769), KTIDETTGD (SEQ ID NO:1770), KFTIDETD (SEQ ID NO:1771), KFTIDETTD (SEQ ID NO:1772), KFTIDETTGD (SEQ ID NO:1773), KVFTIDETD (SEQ ID NO:1774), KVFTIDETTD (SEQ ID NO:1775), KVFTIDETTGD (SEQ ID NO:1776), DDETTK (SEQ ID NO:1751), DIDETTK (SEQ ID NO:1777), DTIDETTK (SEQ ID NO:3934), DFTIDETTK (SEQ ID NO:3935), DVFTIDETTK (SEQ ID NO:3936), DDETTGK (SEQ ID NO:3937), DIDETTGK (SEQ ID NO:3938), DTIDETTGK (SEQ ID NO:3939), DFTIDETTGK (SEQ ID NO:3940), DVFTIDETTGK (SEQ ID NO:3941), EDETTK (SEQ ID NO:3942), EIDETTK (SEQ ID NO:3943), ETIDETTK (SEQ ID NO:3944), EFTIDETTK (SEQ ID NO:3945), DVFTIDETTK (SEQ ID NO:3946), EDETTGK (SEQ ID NO:3947), EIDETTGK (SEQ ID NO:3948), ETIDETTGK (SEQ ID NO:3949), EFTIDETTGK (SEQ ID NO:3950), EVFTIDETTGK (SEQ ID NO:3951), IDETT (SEQ ID NO:1778), TIDETT (SEQ ID NO:1779), DETTG (SEQ ID NO:1780), IDETTG (SEQ ID NO:1781) KDETE (SEQ ID NO:1782), KIDETE (SEQ ID NO:1783), KDETTE (SEQ ID NO:1784), KTIDETE (SEQ ID NO:1785), KIDETTE (SEQ ID NO:1786), KTIDETTE (SEQ ID NO:1787), KDETTGE (SEQ ID NO:1788), KIDETTGE (SEQ ID NO:1789), KTIDETTGE (SEQ ID NO:1790), KFTIDETE (SEQ ID NO:1791), KFTIDETTE (SEQ ID NO:1792), KFTIDETTGE (SEQ ID NO:1793), KVFTIDETE (SEQ ID NO:1794), KIFTIDETTE (SEQ ID NO:1795), KVFTIDETTGE (SEQ ID NO:1796), CDPKC (SEQ ID NO:1797), CDPKTC (SEQ ID NO:1798), CDPKTGC (SEQ ID NO:1799), CIDPKC (SEQ ID NO:1800), CIDPKTC (SEQ ID NO:1801), CIDPKTGC (SEQ ID NO:1802), CSIDPKC (SEQ ID NO:1803), CSIDPKTC (SEQ ID NO:1804), CSIDPKTGC (SEQ ID NO:1805), CFSIDPKC (SEQ ID NO:1806), CFSIDPKTC (SEQ ID NO:1807), CFSIDPKTGC (SEQ ID NO:1808), CYFSIDPKC (SEQ ID NO:1809), CYFSIDPKTC (SEQ ID NO:1810), CYFSIDPKTGC (SEQ ID NO:1811), EDPKK (SEQ ID NO:1812), EDPKTK (SEQ ID NO:1813), EDPKTGK (SEQ ID NO:1814), EIDPKK (SEQ ID NO:1815), EIDPKTK (SEQ ID NO:1816), EIDPKTGK (SEQ ID NO:1817), ESIDPKK (SEQ ID NO:1818), ESIDPKTK (SEQ ID NO:1819), ESIDPKTGK (SEQ ID NO:1820), EFSIDPKK (SEQ ID NO:1821), EFSIDPKTK (SEQ ID NO:1822), EFSIDPKTGK (SEQ ID NO:1823), EYFSIDPKK (SEQ ID NO:1824), EYFSIDPKTK (SEQ ID NO:1825), EYFSIDPKTGK (SEQ ID NO:1826), KDPKD (SEQ ID NO:1827), KDPKTD (SEQ ID NO:1828), KDPKTGD (SEQ ID NO:1829), KIDPKD (SEQ ID NO:1830), KIDPKTD (SEQ ID NO:1831), KIDPKTGD (SEQ ID NO:1832), KSIDPKD (SEQ ID NO:1833), KSIDPKTD (SEQ ID NO:1834), KSIDPKTGD (SEQ ID NO:1835), KFSIDPKD (SEQ ID NO:1836), KFSIDPKTD (SEQ ID NO:1837), KFSIDPKTGD (SEQ ID NO:1838), KYFSIDPKD (SEQ ID NO:1839), KYFSIDPKTD (SEQ ID NO:1840), KYFSIDPKTGD (SEQ ID NO:1841), DDPKK (SEQ ID NO:1842), DDPKTK (SEQ ID NO:1843), DDPKTGK (SEQ ID NO:1844), DIDPKK (SEQ ID NO:1845), DIDPKTK (SEQ ID NO:1846), DIDPKTGK (SEQ ID NO:1847), DSIDPKK (SEQ ID NO:1848), DSIDPKTK (SEQ ID NO:1849), DSIDPKTGK (SEQ ID NO:1850), DFSIDPKK (SEQ ID NO:1851), DFSIDPKTK (SEQ ID NO:1852), DFSIDPKTGK (SEQ ID NO:1853), DYFSIDPKK (SEQ ID NO:1854), DYFSIDPKTK (SEQ ID NO:1855), DYFSIDPKTGK (SEQ ID NO:1856), KDPKE (SEQ ID NO:1857), KDPKTE (SEQ ID NO:1858), KDPKTGE (SEQ ID NO:1859), KIDPKE (SEQ ID NO:1860), KIDPKTE (SEQ ID NO:1861), KIDPKTGE (SEQ ID NO:1862), KSIDPKE (SEQ ID NO:1863), KSIDPKTE (SEQ ID NO:1864), KSIDPKTGE (SEQ ID NO:1865), KFSIDPKE (SEQ ID NO:1866), KFSIDPKTE (SEQ ID NO:1867), KFSIDPKTGE (SEQ ID NO:1868), KYFSIDPKE (SEQ ID NO:1869), KYFSIDPKTE (SEQ ID NO:1870), KYFSIDPKTGE (SEQ ID NO:1871), DPKTG (SEQ ID NO:1872), IDPKT (SEQ ID NO:1873), IDPKTG (SEQ ID NO:1874), SIDPK (SEQ ID NO:1875), SIDPKT (SEQ ID NO:1876), SIDPKTG (SEQ ID NO:1877), FSIDPK (SEQ ID NO:1878), FSIDPKT (SEQ ID NO:1879), FSIDPKTG (SEQ ID NO:1880), YFSIDPK (SEQ ID NO:1881), YFSIDPKT (SEQ ID NO:1882) and YFSIDPKTG (SEQ ID NO:1883).

49. A polynucleotide encoding a modulating agent according to claim 45.

50. A modulating agent comprising an antibody or antigen-binding fragment thereof that:
(a) specifically binds to a cadherin-12 CAR sequence selected from the group consisting of VFTIDETTG (SEQ ID NO:266) and YFSIDPKTG (SEQ ID NO:280); and
(b) modulates a cadherin-12-mediated function.

51. A modulating agent according to any one of claims 1-4, wherein the agent comprises one or more cadherin-14 CAR sequences selected from the group consisting DDT, IDDT (SEQ ID NO:281), DDTT (SEQ ID NO:282), IIDDT (SEQ ID NO:283), IDDTT (SEQ ID NO:284), IIDDTT (SEQ ID NO:285), DDTTG (SEQ ID NO:286), IDDTTG (SEQ ID NO:287), IIDDTTG (SEQ ID NO:288), FIIDDT (SEQ ID NO:289), FIIDDTT (SEQ ID NO:290), FIIDDTTG (SEQ ID NO:291), IFIIDDT (SEQ ID NO:292), IFIIDDTT (SEQ ID NO:293), IFIIDDTTG (SEQ ID NO:294), DPK, DPKT (SEQ ID NO:295), DPKTG (SEQ ID NO:296), VDPK (SEQ ID NO:297), VDPKT (SEQ ID NO:298), VDPKTG (SEQ ID NO:299), SVDPK (SEQ ID NO:300), SVDPKT (SEQ ID NO:301), SVDPKTG (SEQ ID NO:302), FSVDPK (SEQ ID NO:303), FSVDPKT (SEQ ID NO:304), FSVDPKTG (SEQ ID NO:305), YFSVDPK (SEQ ID NO:306), YFSVDPKT (SEQ ID NO:307), YFSVDPKTG (SEQ ID NO:308), DAN, DANT (SEQ ID NO:309), DANTG (SEQ ID NO:310), IDANT (SEQ ID NO:311), IDANTG (SEQ ID NO:312), NIDANT (SEQ ID NO:313), NIDANTG (SEQ ID NO:314), FNIDANT (SEQ ID NO:315), FNIDANTG (SEQ ID NO:316), FFNIDAN (SEQ ID NO:317), FFNIDANT (SEQ ID NO:318) and FFNIDANTG (SEQ ID NO:319).

52. A modulating agent according to claim 51, wherein the agent comprises a linear peptide having the sequence N-Ac-IFIIDDTTG-NH₂ (SEQ ID NO:294), N-Ac-YFSVDPKTG-NH₂ (SEQ ID NO:308) or N-Ac-FFNIDANTG-NH₂ (SEQ ID NO:319).

53. A modulating agent according to claim 51, wherein a cadherin-14 CAR sequence is present within a cyclic peptide.

54. A modulating agent according to claim 53, wherein the cyclic peptide comprises a sequence selected from the group consisting of CDDTC (SEQ ID NO:1884), CIDDTC (SEQ ID NO:1885), CDDTTC (SEQ ID NO:1886), CIIDDTC (SEQ ID NO:1887), CIDDTTC (SEQ ID NO:1888), CIIDDTTC (SEQ ID NO:1889), CDDTTGC (SEQ ID NO:1890), CIDDTTGC (SEQ ID NO:1891), CIIDDTTGC (SEQ ID NO:1892), CFIIDDTC (SEQ ID NO:1893), CFIIDDTTC (SEQ ID NO:1894), CFIIDDTTGC (SEQ ID NO:1895), CIFIIDDTC (SEQ ID NO:1896), CIFIIDDTTC (SEQ ID NO:1897), CIFIIDDTTGC (SEQ ID NO:1898), EDDTTK (SEQ ID NO:1899), EIDDTTK (SEQ ID NO:3952), EIIDDTTK (SEQ ID NO:3953), EFIIDDTTK (SEQ ID NO:3954), EIFIIDDTTK (SEQ ID NO:3955), EDDTTGK (SEQ ID NO:3956), EIDDTTGK (SEQ ID NO:3957), EIIDDTTGK (SEQ ID NO:3958), EFIIDDTTGK (SEQ ID NO:3959), EIFIIDDTTGK (SEQ ID NO:3960), DDDTTK (SEQ ID NO:3961), DIDDTTK (SEQ ID NO:3962), DFIIDDTTK (SEQ ID NO:3963), DIFIIDDTTK (SEQ ID NO:3964), DDDTTGK (SEQ ID NO:3965), DIDDTTGK (SEQ ID NO:3966), DIIDDTTGK (SEQ ID NO:3967), DFIIDDTTGK (SEQ ID NO:3968), DIFIIDDTTGK (SEQ ID NO:3969), DDDTK (SEQ ID NO:1900), DIDDTNK (SEQ ID NO:1901), DIIDDTK (SEQ ID NO:1902), DFIIDDTK (SEQ ID NO:1903), DIFIIDDTK (SEQ ID NO:1904), EDDTK (SEQ ID NO:1905), EIDDTK (SEQ ID NO:1906), EIIDDTK (SEQ ID NO:1907), EFIIDDTK (SEQ ID NO:1908), EIFIIDDTK (SEQ ID NO:1909), KDDTD (SEQ ID NO:1910), KIDDTD (SEQ ID NO:1911), KDDTTD (SEQ ID NO:1912), KIIDDTD (SEQ ID NO:1913), KIDDTTD (SEQ ID NO:1914), KIIDDTTD (SEQ ID NO:1915), KDDTTGD (SEQ ID NO:1916), KIDDTTGD (SEQ ID NO:1917), KIIDDTTGD (SEQ ID NO:1918), KFIIDDTD (SEQ ID NO:1919), KFIIDDTTD (SEQ ID NO:1920), KFIIDDTTGD (SEQ ID NO:1921), KIFIIDDTD (SEQ ID NO:1922), KIFIIDDTTD (SEQ ID NO:1923), KIFIIDDTTGD (SEQ ID NO:1924), DDTT (SEQ ID NO:1925), IDDTT (SEQ ID NO:1926), IIDDTT (SEQ ID NO:1927), DDTTG (SEQ ID NO:1928), IDDTTG (SEQ ID NO:1929) KDDTE (SEQ ID NO:1930), KIDDTE (SEQ ID NO:1931), KDDTTE (SEQ ID NO:1932), KIIDDTE (SEQ ID NO:1933), KIDDTTE (SEQ ID NO:1934), KIIDDTTE (SEQ ID NO:1935), KDDTTGE (SEQ ID NO:1936), KIDDTTGE (SEQ ID NO:1937), KIIDDTTGE (SEQ ID NO:1938), KFIIDDTE (SEQ ID NO:1939), KFIIDDTTE (SEQ ID NO:1940), KFIIDDTTGE (SEQ ID NO:1941), KIFIIDDTE (SEQ ID NO:1942), KIFIIDDTTE (SEQ ID NO:1943), KIFIIDDTTGE (SEQ ID NO:1944), CDPKC (SEQ ID NO:1945), CVDPKC (SEQ ID NO:1946), CVDPKTC (SEQ ID NO:1947), CVDPKTGC (SEQ ID NO:1948), CSVDPKC (SEQ ID NO:1949), CSVDPKTC (SEQ ID NO:1950), CSVDPKTGC (SEQ ID NO:1951), CFSVDPKC (SEQ ID NO:1952), CFSVDPKTC (SEQ ID NO:1953), CFSVDPKTGC (SEQ ID NO:1954), CYFSVDPKC (SEQ ID NO:1955), CYFSVDPKTC (SEQ ID NO:1956), CYFSVDPKTGC (SEQ ID NO:1957), CDPKTC (SEQ ID NO:3970), CDPKTGC (SEQ ID NO:3971), CDANC (SEQ ID NO:1958), CDANTC (SEQ ID NO:1959), CDANTGC (SEQ ID NO:1960), CIDANTC (SEQ ID NO:1961), CIDANTGC (SEQ ID NO:1962), CNIDANTC (SEQ ID NO:1963), CNIDANTGC (SEQ ID NO:1964), CFNIDANTC (SEQ ID NO:1965), CFNIDANTGC (SEQ ID NO:1966), CFFNIDANC (SEQ ID NO:1967), CFFNIDANTC (SEQ ID NO:1968), CFFNIDANTGC (SEQ ID NO:1969), CIDANC (SEQ ID NO:3972), CNIDANC (SEQ ID NO:3973), CFNIDANC (SEQ ID NO:3974), EDPKK (SEQ ID NO:1970), EDPKTK (SEQ ID NO:1971), EDPKTGK (SEQ ID NO:1972), EVDPKK (SEQ ID NO:1973), EVDPKTK (SEQ ID NO:1974), EVDPKTGK (SEQ ID NO:1975), ESVDPKK (SEQ ID NO:1976), ESVDPKTK (SEQ ID NO:1977), ESVDPKTGK (SEQ ID NO:1978), EFSVDPKK (SEQ ID NO:1979), EFSVDPKTK (SEQ ID NO:1980), EFSVDPKTGK (SEQ ID NO:1981), EYFSVDPKK (SEQ ID NO:1982), EYFSVDPKTK (SEQ ID NO:1983), EYFSVDPKTGK (SEQ ID NO:1984), EDANK (SEQ ID NO:1985), EDANTK (SEQ ID NO:1986), EDANTGK (SEQ ID NO:1987), EIDANTK (SEQ ID NO:1988), EIDANTGK (SEQ ID NO:1989), ENIDANTK (SEQ ID NO:1990), ENIDANTGK (SEQ ID NO:1991), EFNIDANTK (SEQ ID NO:1992), EFNIDANTGK (SEQ ID NO:1993), EFFNIDANK (SEQ ID NO:1994), EFFNIDANTK (SEQ ID NO:1995), EFFNIDANTGK (SEQ ID NO:1996), EIDANK (SEQ ID NO:3975), ENIDANK (SEQ ID NO:3976), EFNIDANK (SEQ ID NO:3977), KVDPKD (SEQ ID NO:1997), KVDPKTD (SEQ ID NO:1998), KVDPKTGD (SEQ ID NO:1999), KSVDPKD (SEQ ID NO:2000), KSVDPKTD (SEQ ID NO:2001), KSVDPKTGD (SEQ ID NO:2002), KFSVDPKD (SEQ ID NO:2003), KFSVDPKTD (SEQ ID NO:2004), KFSVDPKTGD (SEQ ID NO:2005), KYFSVDPKD (SEQ ID NO:2006), KYFSVDPKTD (SEQ ID NO:2007), KYFSVDPKTGD (SEQ ID NO:2008), KDPKD (SEQ ID NO:3978), KDPKTD (SEQ ID NO:3979), KDPKTGD (SEQ ID NO:3980), KDAND (SEQ ID NO:3981), KIDAND (SEQ ID NO:3982), KNIDAND (SEQ ID NO:3983), KDANTD (SEQ ID NO:2009), KDANTGD (SEQ ID NO:2010), KIDANTD (SEQ ID NO:2011), KIDANTGD (SEQ ID NO:2012), KNIDANTD (SEQ ID NO:2013), KNIDANTGD (SEQ ID NO:2014), KFNIDANTD (SEQ ID NO:2015), KFNIDANTGD (SEQ ID NO:2016), KFFNIDAND (SEQ ID NO:2017), KFFNIDANTD (SEQ ID NO:2018), KFFNIDANTGD (SEQ ID NO:2019), DDPKK (SEQ ID NO:2020), DDPKTK (SEQ ID NO:2021), DDPKTGK (SEQ ID NO:2022), DVDPKK (SEQ ID NO:2023), DVDPKTK (SEQ ID NO:2024), DVDPKTGK (SEQ ID NO:2025), DSVDPKK (SEQ ID NO:2026), DSVDPKTK (SEQ ID NO:2027), DSVDPKTGK (SEQ ID NO:2028), DFSVDPKK (SEQ ID NO:2029), DFSVDPKTK (SEQ ID NO:2030), DFSVDPKTGK (SEQ ID NO:2031), DYFSVDPKK (SEQ ID NO:2032), DYFSVDPKTK (SEQ ID NO:2033), DYFSVDPKTGK (SEQ ID NO:2034), DDANK (SEQ ID NO:2035), DDANTK (SEQ ID NO:2036), DDANTGK (SEQ ID NO:2037), DIDANTK (SEQ ID NO:2038), DIDANTGK (SEQ ID NO:2039), DNIDANTK (SEQ ID NO:2040), DNIDANTGK (SEQ ID NO:2041), DFNIDANTC (SEQ ID NO:2042), DFNIDANTGK (SEQ ID NO:2043), DFFNIDANK (SEQ ID NO:2044), DFFNIDANTK (SEQ ID NO:2045), DFFNIDANTGK (SEQ ID NO:2046), DIDANK (SEQ ID NO:3984), DNIDANK (SEQ ID NO:3985), DFNIDANK (SEQ ID NO:3986), DFNIDANTK (SEQ ID NO:3987), KDPKE (SEQ ID NO:3988), KDPKTE (SEQ ID NO:3989), KDPKTGE (SEQ ID NO:3990), KVDPKE (SEQ ID NO:2047), KVDPKTE (SEQ ID NO:2048), KVDPKTGE (SEQ ID NO:2049), KSVDPKE (SEQ ID NO:2050), KSVDPKTE (SEQ ID NO:2051), KSVDPKTGE (SEQ ID NO:2052), KFSVDPKE (SEQ ID NO:2053), KFSVDPKTE (SEQ ID NO:2054), KFSVDPKTGE (SEQ ID NO:2055), KYFSVDPKE (SEQ ID NO:2056), KYFSVDPKTE (SEQ ID NO:2057), KYFSVDPKTGE (SEQ ID NO:2058), KDANE (SEQ ID NO:2059), KDANTE (SEQ ID NO:2060), KDANTGE (SEQ ID NO:2061), KIDANTE (SEQ ID NO:2062), KIDANTGE (SEQ ID NO:2063), KNIDANTE (SEQ ID NO:2064), KNIDANTGE (SEQ ID NO:2065), KFNIDANTE (SEQ ID NO:2066), KFNIDANTGE (SEQ ID NO:2067), KFFNIDANE (SEQ ID NO:2068), KFFNIDANTE (SEQ ID NO:2069), KFFNIDANTGE (SEQ ID NO:2070), KIDANE (SEQ ID NO:3991), KNIDANE (SEQ ID NO:3992), KFNIDANE (SEQ ID NO:3993), VDPKT (SEQ ID NO:2071), VDPKTG (SEQ ID NO:2072), SVDPK (SEQ ID NO:2073), SVDPKT (SEQ ID NO:2074), SVDPKTG (SEQ ID NO:2075), FSVDPK (SEQ ID NO:2076), FSVDPKT (SEQ ID NO:2077), FSVDPKTG (SEQ ID NO:2078), YFSVDPK (SEQ ID NO:2079), YFSVDPKT (SEQ ID NO:2080), YFSVDPKTG (SEQ ID NO:2081), DANTG (SEQ ID NO:2082), IDANT (SEQ ID NO:2083), IDANTG (SEQ ID NO:2084), NIDANT (SEQ ID NO:2085), NIDANTG (SEQ ID NO:2086), FNIDANT (SEQ ID NO:2087), FNIDANTG (SEQ ID NO:2088), FFNIDAN (SEQ ID NO:2089), FFNIDANT (SEQ ID NO:2090), and FFNIDANTG (SEQ ID NO:2091).

55. A polynucleotide encoding a modulating agent according to claim 51.

56. A modulating agent comprising an antibody or antigen-binding fragment thereof that:
(a) specifically binds to a cadherin-14 CAR sequence selected from the group consisting of IFIIDDTTG (SEQ ID NO:294), YFSVDPKTG (SEQ ID NO:308) and FFNIDANTG (SEQ ID NO:319), and
(b) modulates a cadherin-14-mediated function.

57. A modulating agent according to any one of claims 1-4, wherein the agent comprises one or more cadherin-15 CAR sequences selected from the group consisting of DKF, IDKF (SEQ ID NO:320), DKFT (SEQ ID NO:321), SIDKF (SEQ ID NO:322), IDKFT (SEQ ID NO:323), SIDKFT (SEQ ID NO:324), DKFTG (SEQ ID NO:325), IDKFTG (SEQ ID NO:326), SIDKFTG (SEQ ID NO:327), FSIDKF (SEQ ID NO:328), FSIDKFT (SEQ ID NO:329), FSIDKFTG (SEQ ID NO:330), VFSIDKF (SEQ ID NO:331), VFSIDKFT (SEQ ID NO:332), VFSIDKFTG (SEQ ID NO:333), DEL, DELT (SEQ ID NO:334), DELTG (SEQ ID NO:335), IDEL (SEQ ID NO:336), IDELT (SEQ ID NO:337), IDELTG (SEQ ID NO:338), SIDEL (SEQ ID NO:339), SIDELT (SEQ ID NO:340), SIDELTG (SEQ ID NO:341), FSIDEL (SEQ ID NO:342), FSIDELT (SEQ ID NO:343), FSIDELTG (SEQ ID NO:344), LFSIDEL (SEQ ID NO:345), LFSIDELT (SEQ ID NO:346) and LFSIDELTG (SEQ ID NO:347).

58. A modulating agent according to claim 57, wherein the agent comprises a linear peptide having the sequence N-Ac-VFSIDKFTG-NH₂ (SEQ ID NO:333) or N-Ac-LFSIDELTG-NH₂ (SEQ ID NO:347).

59. A modulating agent according to claim 57, wherein a cadherin-15 CAR sequence is present within a cyclic peptide.

60. A modulating agent according to claim 59, wherein the cyclic peptide comprises a sequence selected from the group consisting of CDKFC (SEQ ID NO:2092), CIDKFC (SEQ ID NO:2093), CDKFTC (SEQ ID NO:2094), CSIDKFC (SEQ ID NO:2095), CIDKFTC (SEQ ID NO:2096), CSIDKFTC (SEQ ID NO:2097), CDKFTGC (SEQ ID NO:2098), CIDKFTGC (SEQ ID NO:2099), CSIDKFTGC (SEQ ID NO:2100), CFSIDKFC (SEQ ID NO:2101), CFSIDKFTC (SEQ ID NO:2102), CFSIDKFTGC (SEQ ID NO:2103), CVFSIDKFC (SEQ ID NO:2104), CVFSIDKFTC (SEQ ID NO:2105), CVFSIDKFTGC (SEQ ID NO:2106), DDKFK (SEQ ID NO:2108), DIDKFK (SEQ ID NO:2109), DSIDKFK (SEQ ID NO:2110), DFSIDKFK (SEQ ID NO:2111), DVFSIDKFK (SEQ ID NO:2112), DDKFTK (SEQ ID NO:2107), DIDKFTK (SEQ ID NO:2133), DSIDKFTK (SEQ ID NO:3994), DFSIDKFTK (SEQ ID NO:3995), DVFSIDKFTK (SEQ ID NO:3996), DDKTGK (SEQ ID NO:3997), DIDKFTGK (SEQ ID NO:3998), DSIDKFTGK (SEQ ID NO:3999), DFSIDKFTGK (SEQ ID NO:4000), DVFSIDKFTGK (SEQ ID NO:4001), EDKFTK (SEQ ID NO:4002), EIDKFTK (SEQ ID NO:4003), ESIDKFTK (SEQ ID NO:4004), EFSIDKFTK (SEQ ID NO:4005), EVFSIDKFTK (SEQ ID NO:4006), EDKFTGK (SEQ ID NO:4007), EIDKFTGK (SEQ ID NO:4008), EFSIDKFTGK (SEQ ID NO:4009), EVFSIDKFTGK (SEQ ID NO:4010), EDKFK (SEQ ID NO:2113), EIDKFK (SEQ ID NO:2114), ESIDKFK (SEQ ID NO:2115), EFSIDKFK (SEQ ID NO:2116), EVFSIDKFK (SEQ ID NO:2117), KDKFD (SEQ ID NO:2118), KIDKFD (SEQ ID NO:2119), KDKFTD (SEQ ID NO:2120), KSIDKFD (SEQ ID NO:2121), KIDKFTD (SEQ ID NO:2122), KSIDKFTD (SEQ ID NO:2123), KDKFTGD (SEQ ID NO:2124), KIDKFTGD (SEQ ID NO:2125), KSIDKFTGD (SEQ ID NO:2126), KFSIDKFD (SEQ ID NO:2127), KFSIDKFTD (SEQ ID NO:2128), KFSIDKFTGD (SEQ ID NO:2129), KVFSIDKFD (SEQ ID NO:2130), KVFSIDKFTD (SEQ ID NO:2131), KVFSIDKFTGD (SEQ ID NO:2132), IDKFT (SEQ ID NO:2134), SIDKFT (SEQ ID NO:2135), DKFTG (SEQ ID NO:2136), IDKFTG (SEQ ID NO:2137) KDKFE (SEQ ID NO:2138), KIDKFE (SEQ ID NO:2139), KDKFTE (SEQ ID NO:2140), KSIDKFE (SEQ ID NO:2141), KIDKFTE (SEQ ID NO:2142), KSIDKFTE (SEQ ID NO:2143), KDKFTGE (SEQ ID NO:2144), KIDKFTGE (SEQ ID NO:2145), KSIDKFTGE (SEQ ID NO:2146), KFSIDKFE (SEQ ID NO:2147), KFSIDKFTE (SEQ ID NO:2148), KFSIDKFTGE (SEQ ID NO:2149), KVFSIDKFE (SEQ ID NO:2150), KIFSIDKFTE (SEQ ID NO:2151), KVFSIDKFTGE (SEQ ID NO:2152), CDELC (SEQ ID NO:2153), CDELTC (SEQ ID NO:2154), CDELTGC (SEQ ID NO:2155), CIDELC (SEQ ID NO:2156), CIDELTC (SEQ ID NO:2157), CIDELTGC (SEQ ID NO:2158), CSIDELC (SEQ ID NO:2159), CSIDELTC (SEQ ID NO:2160), CSIDELTGC (SEQ ID NO:2161), CFSIDELC (SEQ ID NO:2162), CFSIDELTC (SEQ ID NO:2163), CFSIDELTGC (SEQ ID NO:2164), CLFSIDELC (SEQ ID NO:2165), CLFSIDELTC (SEQ ID NO:2166), CLFSIDELTGC (SEQ ID NO:2167), EDELCK (SEQ ID NO:2168), EDELTK (SEQ ID NO:2169), EDELTGK (SEQ ID NO:2170), EIDELK (SEQ ID NO:2171), EIDELTK (SEQ ID NO:2172), EIDELTGK (SEQ ID NO:2173), ESIDELK (SEQ ID NO:2174), ESIDELTK (SEQ ID NO:2175), ESIDELTGK (SEQ ID NO:2176), EFSIDELK (SEQ ID NO:2177), EFSIDELTK (SEQ ID NO:2178), EFSIDELTGK (SEQ ID NO:2179), ELFSIDELK (SEQ ID NO:2180), ELFSIDELTK (SEQ ID NO:2181), ELFSIDELTGK (SEQ ID NO:2182), KDELD (SEQ ID NO:2183), KDELTD (SEQ ID NO:2184), KDELTGD (SEQ ID NO:2185), KIDELD (SEQ ID NO:2186), KIDELTD (SEQ ID NO:2187), KIDELTGD (SEQ ID NO:2188), KSIDELD (SEQ ID NO:2189), KSIDELTD (SEQ ID NO:2190), KSIDELTGD (SEQ ID NO:2191), KFSIDELD (SEQ ID NO:2192), KFSIDELTD (SEQ ID NO:2193), KFSIDELTGD (SEQ ID NO:2194), KLFSIDELD (SEQ ID NO:2195), KLFSIDELTD (SEQ ID NO:2196), KLFSIDELTGD (SEQ ID NO:2197), DDELK (SEQ ID NO:2198), DDELTK (SEQ ID NO:2199), DDELTGK (SEQ ID NO:2200), DIDELK (SEQ ID NO:2201), DIDELTK (SEQ ID NO:2202), DIDELTGK (SEQ ID NO:2203), DSIDELK (SEQ ID NO:2204), DSIDELTK (SEQ ID NO:2205), DSIDELTGK (SEQ ID NO:2206), DFSIDELK (SEQ ID NO:2207), DFSIDELTK (SEQ ID NO:2208), DFSIDELTGK (SEQ ID NO:2209), DLFSIDELK (SEQ ID NO:2210), DLFSIDELTK (SEQ ID NO:2211), DLFSIDELTGK (SEQ ID NO:2212), KDELE (SEQ ID NO:2213), KDELTE (SEQ ID NO:2214), KDELTGE (SEQ ID NO:2215), KIDELE (SEQ ID NO:2216), KIDELTE (SEQ ID NO:2217), KIDELTGE (SEQ ID NO:2218), KSIDELE (SEQ ID NO:2219), KSIDELTE (SEQ ID NO:2220), KSIDELTGE (SEQ ID NO:2221), KFSIDELE (SEQ ID NO:2222), KFSIDELTE (SEQ ID NO:2223), KFSIDELTGE (SEQ ID NO:2224), KLFSIDELE (SEQ ID NO:2225), KLFSIDELTE (SEQ ID NO:2226), KLFSIDELTGE (SEQ ID NO:2227), DELTG (SEQ ID NO:2228), IDELT (SEQ ID NO:2229), IDELTG (SEQ ID NO:2230), SIDEL (SEQ ID NO:2231), SIDELT (SEQ ID NO:2232), SIDELTG (SEQ ID NO:2233), FSIDEL (SEQ ID NO:2234), FSIDELT (SEQ ID NO:2235), FSIDELTG (SEQ ID NO:2236), LFSIDEL (SEQ ID NO:2237), LFSIDELT (SEQ ID NO:2238) and LFSIDELTG. (SEQ ID NO:2239).

61. A polynucleotide encoding a modulating agent according to claim 57.

62. A modulating agent comprising an antibody or antigen-binding fragment thereof that:
(a) specifically binds to a cadherin-15 CAR sequence selected from the group consisting of VFSIDKFTG (SEQ ID NO:333) and LFSIDELTG (SEQ ID NO:347); and
(b) modulates a cadherin-15-mediated function.

63. A modulating agent according to any one of claims 1-4, wherein the agent comprises one or more T-cadherin CAR sequences selected from the group consisting of NEN, INEN (SEQ ID NO:348), NENT (SEQ ID NO:349), RINEN (SEQ ID NO:350), INENT (SEQ ID NO:351), RINENT (SEQ ID NO:352), NENTG (SEQ ID NO:353), INENTG (SEQ ID NO:354), RINENTG (SEQ ID NO:355), FRINEN (SEQ ID NO:356), FRINENT (SEQ ID NO:357), FRINENTG (SEQ ID NO:358), IFRINEN (SEQ ID NO:359), IFRINENT (SEQ ID NO:360) and IFRINENTG (SEQ ID NO:361).

64. A modulating agent according to claim 63, wherein the agent comprises a linear peptide having the sequence N-Ac-IFRINENTG-NH₂ (SEQ ID NO:361).

65. A modulating agent according to claim 63, wherein a T-cadherin CAR sequence is present within a cyclic peptide.

66. A modulating agent according to claim 65, wherein the cyclic peptide comprises a sequence selected from the group consisting of CNENC (SEQ ID NO:2240), CINENC (SEQ ID NO:2241), CNENTC (SEQ ID NO:2242), CRINENC (SEQ ID NO:2243), CINENTC (SEQ ID NO:2244), CRINENTC (SEQ ID NO:2245), CNENTGC (SEQ ID NO:2246), CINENTGC (SEQ ID NO:2247), CRINENTGC (SEQ ID NO:2248), CFRINENC (SEQ ID NO:2249), CFRINENTC (SEQ ID NO:2250), CFRINENTGC (SEQ ID NO:2251), CIFRINENC (SEQ ID NO:2252), CIFRINENTC (SEQ ID NO:2253), CIFRINENTGC (SEQ ID NO:2254), DNENK (SEQ ID NO:2255), DINENK (SEQ ID NO:2256), DRINENK (SEQ ID NO:2257), DFRINENK (SEQ ID NO:2258), DIFRINENK (SEQ ID NO:2259), ENENK (SEQ ID NO:2260), EINENK (SEQ ID NO:2261), ERINENK (SEQ ID NO:2262), EFRINENK (SEQ ID NO:2263), EIFRINENK (SEQ ID NO:2264), KNEND (SEQ ID NO:2265), KINEND (SEQ ID NO:2266), KNENTD (SEQ ID NO:2267), KRINEND (SEQ ID NO:2268), KINENTD (SEQ ID NO:2269), KRINENTD (SEQ ID NO:2270), KNENTGD (SEQ ID NO:2271), KINENTGD (SEQ ID NO:2272), KRINENTGD (SEQ ID NO:2273), KFRINEND (SEQ ID NO:2274), KFRINENTD (SEQ ID NO:2275), KFRINENTGD (SEQ ID NO:2276), KIFRINEND (SEQ ID NO:2277), KIFRINENTD (SEQ ID NO:2278), KIFRINENTGD (SEQ ID NO:2279), DNENTK (SEQ ID NO:4011), DINENTK (SEQ ID NO:4012), DRINENTK (SEQ ID NO:4013), DFRINENTK (SEQ ID NO:4014), DIFRINENTK (SEQ ID NO:4015), DNENTGK (SEQ ID NO:4016), DINENTGK (SEQ ID NO:4017), DRINENTGK (SEQ ID NO:4018), DFRINENTGK (SEQ ID NO:4019), DIFRINENTGK (SEQ ID NO:4020), ENENTK (SEQ ID NO:4021), EINENTK (SEQ ID NO:4022), ERINENTK (SEQ ID NO:4023), EFRINENTK (SEQ ID. NO:4024), EIFRINENTK (SEQ ID NO:4025), ENENTGK (SEQ ID NO:4026), EINENTGK (SEQ ID NO:4027), ERINENTGK (SEQ ID NO:4028), EFRINENTGK (SEQ ID NO:4029), EIFRINENTGK (SEQ ID NO:4030), VNENTG (SEQ ID NO:4031), RINENTG (SEQ ID NO:4032), FRINEN (SEQ ID NO:4033), FRINENT (SEQ ID NO:4034), FRINENTG (SEQ ID NO:4035), IFRINEN (SEQ ID NO:4036), IFRINENT (SEQ ID NO:4037), IFRINENTG (SEQ ID NO:4038), VNENT (SEQ ID NO:2280), INENT (SEQ ID NO:2281), RINENT (SEQ ID NO:2282), NENTG (SEQ ID NO:2283), INENTG (SEQ ID NO:2284) KNENE (SEQ ID NO:2285), KINENE (SEQ ID NO:2286), KNENTE (SEQ ID NO:2287), KRINENE (SEQ ID NO:2288), KINENTE (SEQ ID NO:2289), KRINENTE (SEQ ID NO:2290), KNENTGE (SEQ ID NO:2291), KINENTGE (SEQ ID NO:2292), KRINENTGE (SEQ ID NO:2293), KFRINENE (SEQ ID NO:2294), KFRINENTE (SEQ ID NO:2295), KFRINENTGE (SEQ ID NO:2296), KIFRINENE (SEQ ID NO:2297), KIFRINENTE (SEQ ID NO:2298) and KIFRINENTGE (SEQ ID NO:2299).

67. A polynucleotide encoding a modulating agent according to claim 63.

68. A modulating agent comprising an antibody or antigen-binding fragment thereof that:
(a) specifically binds to the T-cadherin CAR sequence IFRINENTG (SEQ ID NO:361); and
(b) modulates a T-cadherin-mediated function.

69. A modulating agent according to any one of claims 1-4, wherein the agent comprises one or more PB-cadherin CAR sequences selected from the group consisting of EEY, EEYT (SEQ ID NO:362), EEYTG (SEQ ID NO:363), VEEY (SEQ ID NO:364), VEEYT (SEQ ID NO:365), VEEYTG (SEQ ID NO:366), VVEEY (SEQ ID NO:367), VVEEYT (SEQ ID NO:368), VVEEYTG (SEQ ID NO:369), FVVEEY (SEQ ID NO:370), FVEEYT (SEQ ID NO:371), FVEEYTG (SEQ ID NO:372), FFVVEEY (SEQ ID NO:373), FFVVEEYT (SEQ ID NO:374), FFVVEEYTG (SEQ ID NO:375), DEL, DELT (SEQ ID NO:376), DELTG (SEQ ID NO:377), IDEL (SEQ ID NO:378), IDELT (SEQ ID NO:379), IDELTG (SEQ ID NO:380), LIDEL (SEQ ID NO:381), LIDELT (SEQ ID NO:382), LIDELTG (SEQ ID NO:383), FLIDEL (SEQ ID NO:384), FLIDELT (SEQ ID NO:385), FLIDELTG (SEQ ID NO:386), IFLIDEL (SEQ ID NO:387), IFLIDELT (SEQ ID NO:388), IFLIDELTG (SEQ ID NO:389), DPK, DPKT (SEQ ID NO:390), DPKTG (SEQ ID NO:391), VDPK (SEQ ID NO:392), VDPKT (SEQ ID NO:393), VDPKTG (SEQ ID NO:394), TVDPK (SEQ ID NO:395), TVDPKT (SEQ ID NO:396), TVDPKTG (SEQ ID NO:397), FTVDPK (SEQ ID NO:398), FTVDPKT (SEQ ID NO:399), FTVDPKTG (SEQ ID NO:400), HFTVDPK (SEQ ID NO:401), HFTVDPKT (SEQ ID NO:402), HFTVDPKTG (SEQ ID NO:403), DAD, DADT (SEQ ID NO:404), DADTG (SEQ ID NO:405), IDAD (SEQ ID NO:406), IDADT (SEQ ID NO:407), IDADTG (SEQ ID NO:408), DIDAD (SEQ ID NO:409), DIDADT (SEQ ID NO:410), DIDADTG (SEQ ID NO:411), FDIDAD (SEQ ID NO:412), FDIDADT (SEQ ID NO:413), FDIDADTG (SEQ ID NO:414), IFDIDAD (SEQ ID NO:415), IFDIDADT (SEQ ID NO:416) and IFDIDADTG (SEQ ID NO:417);

70. A modulating agent according to claim 69, wherein the agent comprises a linear peptide having the sequence N-Ac-FFVVEEYTG-NH₂ (SEQ ID NO:375), N-Ac-IFLIDELTG-NH₂ (SEQ ID NO:389), N-Ac-HFTVDPKTG-NH₂ (SEQ ID NO:403) or N-Ac-IFDIDADTG-NH₂ (SEQ ID NO:417).

71. A modulating agent according to claim 69, wherein a PB-cadherin CAR sequence is present within a cyclic peptide.

72. A modulating agent according to claim 71, wherein the cyclic peptide comprises a sequence selected from the group consisting of CEEYC (SEQ ID NO:2300), CEEYTC (SEQ ID NO:2301), CEEYTG (SEQ ID NO:2302), CVEEYC (SEQ ID NO:2303), CVEEYTC (SEQ ID NO:2304), CVEEYTGC (SEQ ID NO:2305), CVVEEYC (SEQ ID NO:2306), CVVEEYTC (SEQ ID NO:2307), CVVEEYTGC (SEQ ID NO:2308), CFVVEEYC (SEQ ID NO:2309), CFVEEYTC (SEQ ID NO:2310), CFVEEYTGC (SEQ ID NO:2311), CFFVVEEYC (SEQ ID NO:2312), CFFVVEEYTC (SEQ ID NO:2313), CFFVVEEYTGC (SEQ ID NO:2314), CLIDELC (SEQ ID NO:2315), CLIDELTC (SEQ ID NO:2316), CLIDELTGC (SEQ ID NO:2317), CFLIDELC (SEQ ID NO:2318), CFLIDELTC (SEQ ID NO:2319), CFLIDELTGC (SEQ ID NO:2320), CIFLIDELC (SEQ ID NO:2321), CIFLIDELTC (SEQ ID NO:2322), CIFLIDELTGC (SEQ ID NO:2323), CDELC (SEQ ID NO:4039), CDELTC (SEQ ID NO:4040), CDELTGC (SEQ ID NO:4041), CIDELC (SEQ ID NO:4042), CIDELTC (SEQ ID NO:4043), CIDELTGC (SEQ ID NO:4044), CDPKC (SEQ ID NO:4045), CDPKTC (SEQ ID NO:4046), CDPKTGC (SEQ ID NO:4047), CVDPKC (SEQ ID NO:4048), CVDPKTC (SEQ ID NO:4049), CVDPKTGC (SEQ ID NO:4050), CTVDPKC (SEQ ID NO:2324), CTVDPKTC (SEQ ID NO:2325), CTVDPKTGC (SEQ ID NO:2326), CFTVDPKC (SEQ ID NO:2327), CFTVDPKTC (SEQ ID NO:2328), CFTVDPKTGC (SEQ ID NO:2329), CHFTVDPKC (SEQ ID NO:2330), CHFTVDPKTC (SEQ ID NO:2331), CHFTVDPKTGC (SEQ ID NO:2332), CDADC (SEQ ID NO:2333), CDADTC (SEQ ID NO:2334), CDADTGC (SEQ ID NO:2335), CIDADC (SEQ ID NO:2336), CIDADTC (SEQ ID NO:2337), CIDADTGC (SEQ ID NO:2338), CDIDADC (SEQ ID NO:2339), CDIDADTC (SEQ ID NO:2340), CDIDADTGC (SEQ ID NO:2341), CFDIDADC (SEQ ID NO:2342), CFDIDADTC (SEQ ID NO:2343), CFDIDADTGC (SEQ ID NO:2344), CIFDIDADC (SEQ ID NO:2345), CIFDIDADTC (SEQ ID NO:2346), CIFDIDADTGC (SEQ ID NO:2347), EEEYK (SEQ ID NO:2348), EEEYTK (SEQ ID NO:2349), EEEYTGK (SEQ ID NO:2350), EVEEYK (SEQ ID NO:2351), EVEEYTK (SEQ ID NO:2352), EVEEYTGK (SEQ ID NO:2353), EVVEEYK (SEQ ID NO:2354), EVVEEYTK (SEQ ID NO:2355), EVVEEYTGK (SEQ ID NO:2356), EFVVEEYK (SEQ ID NO:2357), EFVEEYTK (SEQ ID NO:2358), EFVEEYTGK (SEQ ID NO:2359), EFFVVEEYK (SEQ ID NO:2360), EFFVVEEYTK (SEQ ID NO:2361), EFFVVEEYTGK (SEQ ID NO:2362), EDELK (SEQ ID NO:2363), EDELTK (SEQ ID NO:2364), EDELTGK (SEQ ID NO:2365), EIDELK (SEQ ID NO:2366), EIDELTK (SEQ ID NO:2367), EIDELTGK (SEQ ID NO:2368), ELIDELK (SEQ ID NO:2369), ELIDELTK (SEQ ID NO:2370), ELIDELTGK (SEQ ID NO:2371), EFLIDELK (SEQ ID NO:2372), EFLIDELTK (SEQ ID NO:2373), EFLIDELTGK (SEQ ID NO:2374), EIFLIDELK (SEQ ID NO:2375), EIFLIDELTK (SEQ ID NO:2376), EIFLIDELTGK (SEQ ID NO:2377), EDPKK (SEQ ID NO:2378), EDPKTK (SEQ ID NO:2379), EDPKTGK (SEQ ID NO:2380), EVDPKK (SEQ ID NO:2381), EVDPKTK (SEQ ID NO:2382), EVDPKTGK (SEQ ID NO:2383), ETVDPKK (SEQ ID NO:2384), ETVDPKTK (SEQ ID NO:2385), ETVDPKTGK (SEQ ID NO:2386), EFTVDPKK (SEQ ID NO:2387), EFTVDPKTK (SEQ ID NO:2388), EFTVDPKTGK (SEQ ID NO:2389), EHFTVDPKK (SEQ ID NO:2390), EHFTVDPKTK (SEQ ID NO:2391), EHFTVDPKTGK (SEQ ID NO:2392), EDADK (SEQ ID NO:2393), EDADTK (SEQ ID NO:2394), EDADTGK (SEQ ID NO:2395), EIDADK (SEQ ID NO:2396), EIDADTK (SEQ ID NO:2397), EIDADTGK (SEQ ID NO:2398), EDIDADK (SEQ ID NO:2399), EDIDADTK (SEQ ID NO:2400), EDIDADTGK (SEQ ID NO:2401), EFDIDADK (SEQ ID NO:2402), EFDIDADTK (SEQ ID NO:2403), EFDIDADTGK (SEQ ID NO:2404), EIFDIDADK (SEQ ID NO:2405), EIFDIDADTK (SEQ ID NO:2406), EIFDIDADTGK (SEQ ID NO:2407), KEEYD (SEQ ID NO:2408), KEEYTD (SEQ ID NO:2409), KEEYTGD (SEQ ID NO:2410), KVEEYD (SEQ ID NO:2411), KVEEYTD (SEQ ID NO:2412), KVEEYTGD (SEQ ID NO:2413), KVVEEYD (SEQ ID NO:2414), KVVEEYTD (SEQ ID NO:2415), KVVEEYTGD (SEQ ID NO:2416), KFVVEEYD (SEQ ID NO:2417), KFVEEYTD (SEQ ID NO:2418), KFVEEYTGD (SEQ ID NO:2419), KFFVVEEYD (SEQ ID NO:2420), KFFVVEEYTD (SEQ ID NO:2421), KFFVVEEYTGD (SEQ ID NO:2422), KDELD (SEQ ID NO:2423), KDELTD (SEQ ID NO:2424), KDELTGD (SEQ ID NO:2425), KIDELD (SEQ ID NO:2426), KIDELTD (SEQ ID NO:2427), KIDELTGD (SEQ ID NO:2428), KLIDELD (SEQ ID NO:2429), KLIDELTD (SEQ ID NO:2430), KLIDELTGD (SEQ ID NO:2431), KFLIDELD (SEQ ID NO:2432), KFLIDELTD (SEQ ID NO:2433), KFLIDELTGD (SEQ ID NO:2434), KIFLIDELD (SEQ ID NO:2435), KIFLIDELTD (SEQ ID NO:2436), KIFLIDELTGD (SEQ ID NO:2437), KDPKD (SEQ ID NO:2438), KDPKTD (SEQ ID NO:2439), KDPKTGD (SEQ ID NO:2440), KVDPKD (SEQ ID NO:2441), KVDPKTD (SEQ ID NO:2442), KVDPKTGD (SEQ ID NO:2443), KTVDPKD (SEQ ID NO:2444), KTVDPKTD (SEQ ID NO:2445), KTVDPKTGD (SEQ ID NO:2446), KFTVDPKD (SEQ ID NO:2447), KFTVDPKTD (SEQ ID NO:2448), KFTVDPKTGD-(SEQ ID NO:2449), KHFTVDPKD (SEQ ID NO:2450), KHFTVDPKTD (SEQ ID NO:2451), KHFTVDPKTGD (SEQ ID NO:2452), KDADD (SEQ ID NO:2453), KDADTD (SEQ ID NO:2454), KDADTGD (SEQ ID NO:2455), KIDADD (SEQ ID NO:2456), KIDADTD (SEQ ID NO:2457), KIDADTGD (SEQ ID NO:2458), KDIDADD (SEQ ID NO:2459), KDIDADTD (SEQ ID NO:2460), KDIDADTGD (SEQ ID NO:2461), KFDIDADD (SEQ ID NO:2462), KFDIDADTD (SEQ ID NO:2463), KFDIDADTGD (SEQ ID NO:2464), KIFDIDADD (SEQ ID NO:2465), KIFDIDADTD (SEQ ID NO:2466), KIFDIDADTGD (SEQ ID NO:2467), DEEYK (SEQ ID NO:2468), DEEYTK (SEQ ID NO:2469), DEEYTGK (SEQ ID NO:2470), DVEEYK (SEQ ID NO:2471), DVEEYTK (SEQ ID NO:2472), DVEEYTGK (SEQ ID NO:2473), DVVEEYK (SEQ ID NO:2474), DVVEEYTK (SEQ ID NO:2475), DVVEEYTGK (SEQ ID NO:2476), DFVVEEYK (SEQ ID NO:2477), DFVEEYTK (SEQ ID NO:2478), DFVEEYTGK (SEQ ID NO:2479), DFFVVEEYK (SEQ ID NO:2480), DFFVVEEYTK, (SEQ ID NO:2481), DFFVVEEYTGK (SEQ ID NO:2482), DDELK (SEQ ID NO:2483), DDELTK (SEQ ID NO:2484), DDELTGK (SEQ ID NO:2485), DIDELK (SEQ ID NO:2486), DIDELTK (SEQ ID NO:2487), DIDELTGK (SEQ ID NO:2488), DLIDELK (SEQ ID NO:2489), DLIDELTK (SEQ ID NO:2490), DLIDELTGK (SEQ ID NO:2491), DFLIDELK (SEQ ID NO:2492), DFLIDELTK (SEQ ID NO:2493), DFLIDELTGK (SEQ ID NO:2494), DIFLIDELK (SEQ ID NO:2495), DIFLIDELTK (SEQ ID NO:2496), DIFLIDELTGK (SEQ ID NO:2497), DDPKK (SEQ ID NO:2498), DDPKTK (SEQ ID NO:2499), DDPKTGK (SEQ ID NO:2500), DVDPKK (SEQ ID NO:2501), DVDPKYK (SEQ ID NO:2502), DVTPKTGK (SEQ ID NO:2503), DTVDPKK (SEQ ID NO:2504), DTVDPKTK (SEQ ID NO:2505), DTVDPKTGK (SEQ ID NO:2506), DFTVDPKK (SEQ ID NO:2507), DFTVDPKTK (SEQ ID NO:2508), DFTVDPKTGK (SEQ ID NO:2509), DHFTVDPKK (SEQ ID NO:2510), DHFTVDPKTK (SEQ ID NO:2511), DHFTVDPKTGK (SEQ ID NO:2512), DDADK (SEQ ID NO:2513), DDADTK (SEQ ID NO:2514), DDADTGK (SEQ ID NO:2515), DIDADK (SEQ ID NO:2516), DIDADTK (SEQ ID NO:2517), DIDADTGK (SEQ ID NO:2518), DDIDADK (SEQ ID NO:2519), DDIDADTK (SEQ ID NO:2520), DDIDADTGK (SEQ ID NO:2521), DFDIDADK (SEQ ID NO:2522), DFDIDADTK (SEQ ID NO:2523), DFDIDADTGK (SEQ ID NO:2524), DIFDIDADK (SEQ ID NO:2525), DIFDIDADTK (SEQ ID NO:2526), DIFDIDADTGK (SEQ ID NO:2527), KEEYE (SEQ ID NO:2528), KEEYTE (SEQ ID NO:2529), KEEYTGE (SEQ ID NO:2530), KVEEYE (SEQ ID NO:2531), KVEEYTE (SEQ ID NO:2532), KVEEYTGE (SEQ ID NO:2533), KVVEEYE (SEQ ID NO:2534), KVVEEYTE (SEQ ID NO:2535), KVVEEYTGE (SEQ ID NO:2536), KFVVEEYE (SEQ ID NO:2537), KFVEEYTE (SEQ ID NO:2538), KFVEEYTGE (SEQ ID NO:2539), KFFVVEEYE (SEQ ID NO:2540), KFFVVEEYTE (SEQ ID NO:2541), KFFVVEEYTGE (SEQ ID NO:2542), KDELE (SEQ ID NO:2543), KDELTE (SEQ ID NO:2544), KDELTGE (SEQ ID NO:2545), KIDELE (SEQ ID NO:2546), KIDELTE (SEQ ID NO:2547), KIDELTGE (SEQ ID NO:2548), KLIDELE (SEQ ID NO:2549), KLIDELTE (SEQ ID NO:2550), KLIDELTGE (SEQ ID NO:2551), KFLIDELE (SEQ ID NO:2552), KFLIDELTE (SEQ ID NO:2553), KFLIDELTGE (SEQ ID NO:2554), KIFLIDELE (SEQ ID NO:2555), KIFLIDELTE (SEQ ID NO:2556), KIFLIDELTGE (SEQ ID NO:2557), KDPKE (SEQ ID NO:2558), KDPKTE (SEQ ID NO:2559), KDPKTGE (SEQ ID NO:2560), KVDPKE (SEQ ID NO:2561), KVDPKTE (SEQ ID NO:2562), KDPKTGE (SEQ ID NO:2563), KTVDPKE (SEQ ID NO:2564), KTVDPKTE (SEQ ID NO:2565), KTVDPKTGE (SEQ ID NO:2566), KFTVDPKE (SEQ ID NO:2567), KFTVDPKTE (SEQ ID NO:2568), KFTVDPKTGE (SEQ ID NO:2569), KHFTVDPKE (SEQ ID NO:2570), KHFTVDPKTE (SEQ ID NO:2571), KHFTVDPKTGE (SEQ ID NO:2572), KDADE (SEQ ID NO:2573), KDADTE (SEQ ID NO:2574), KDADTGE (SEQ ID NO:2575), KIDADE (SEQ ID NO:2576), KIDADTE (SEQ ID NO:2577), KIDADTGE (SEQ ID NO:2578), KDIDADE (SEQ ID NO:2579), KDIDADTE (SEQ ID NO:2580), KDIDADTGE (SEQ ID NO:2581), KFDIDADE (SEQ ID NO:2582), KFDIDADTE (SEQ ID NO:2583), KFDIDADTGE (SEQ ID NO:2584), KIFDIDADE (SEQ ID NO:2585), KIFDIDADTE (SEQ ID NO:2586), KIFDIDADTGE (SEQ ID NO:2587), VEEYT (SEQ ID NO:2588), VEEYTG (SEQ ID NO:2589), VVEEY (SEQ ID NO:2590), VVEEYT (SEQ ID NO:2591), VVEEYTG (SEQ ID NO:2592), FVVEEY (SEQ ID NO:2593), FVEEYT (SEQ ID NO:2594), FVEEYTG (SEQ ID NO:2595), FFVVEEY (SEQ ID NO:2596), FFVVEEYT (SEQ ID NO:2597), FFVVEEYTG (SEQ ID NO:2598), LIDEL (SEQ ID NO:2599), LIDELT (SEQ ID NO:2600), LIDELTG (SEQ ID NO:2601), FLIDEL (SEQ ID NO:2602), FLIDELT (SEQ ID NO:2603), FLIDELTG (SEQ ID NO:2604), IFLIDEL (SEQ ID NO:2605), IFLIDELT (SEQ ID NO:2606), IFLIDELTG (SEQ ID NO:2607), TVDPK (SEQ ID NO:2608), TVDPKT (SEQ ID NO:2609), TVDPKTG (SEQ ID NO:2610), FTVDPK (SEQ ID NO:2611), FTVDPKT (SEQ ID NO:2612), FTVDPKTG (SEQ ID NO:2613), HFTVDPK (SEQ ID NO:2614), HFTVDPKT (SEQ ID NO:2615), HFTVDPKTG (SEQ ID NO:2616), DADTG (SEQ ID NO:2617), IDADT (SEQ ID NO:2618), IDADTG (SEQ ID NO:2619), DIDAD (SEQ ID NO:2620), DIDADT (SEQ ID NO:2621), DIDADTG (SEQ ID NO:2622), FDIDAD (SEQ ID NO:2623), FDIDADT (SEQ ID NO:2624), FDIDADTG (SEQ ID NO:2625), IFDIDAD (SEQ ID NO:2626), IFDIDADT (SEQ ID NO:2627) and IFDIDADTG (SEQ ID NO:2628).

73. A polynucleotide encoding a modulating agent according to claim 69.

74. A modulating agent comprising an antibody or antigen-binding fragment thereof that:
(a) specifically binds to a PB-cadherin. CAR sequence selected from the group consisting of FFVVEEYTG (SEQ ID NO:375), IFLIDELTG (SEQ ID NO:389), HFTVDPKTG (SEQ ID NO:403) and IFDIDADTG (SEQ ID NO:417); and
(b) modulates a PB-cadherin-mediated function.

75. A modulating agent according to any one of claims 1-4, wherein the agent comprises one or more LI-cadherin CAR sequences selected from the group consisting of NNK, NNKT (SEQ ID NO:418), NNKTG (SEQ ID NO:419), INNK (SEQ ID NO:420), INNKT (SEQ ID NO:421), INNKTG (SEQ ID NO:422), QINNK (SEQ ID NO:423), QINNKT (SEQ ID NO:424), QINNKTG (SEQ ID NO:425), FQINNK (SEQ ID NO:426), FQINNKT (SEQ ID NO:427), FQINNKTG (SEQ ID NO:428), YFQINNK (SEQ ID NO:429), YFQINNKT (SEQ ID NO:430) and YFQINNKTG (SEQ ID NO:431);

76. A modulating agent according to claim 75, wherein the agent comprises a linear peptide having the sequence N-Ac-YFQINNKTG-NH₂ (SEQ ID NO:431).

77. A modulating agent according to claim 75, wherein a LI-cadherin CAR sequence is present within a cyclic peptide.

78. A modulating agent according to claim 77, wherein the cyclic peptide comprises a sequence selected from the group consisting of CNNKC (SEQ ID NO:2629), CNNKTC (SEQ ID NO:2630), CNNKTGC (SEQ ID NO:2631), CINNKC (SEQ ID NO:2632), CINNKTC (SEQ ID NO:2633), CINNKTGC (SEQ ID NO:2634), CQINNKC (SEQ ID NO:2635), CQINNKTC (SEQ ID NO:2636), CQINNKTGC (SEQ ID NO:2637), CFQINNKC (SEQ ID NO:2638), CFQINNKTC (SEQ ID NO:2639), CFQINNKTGC (SEQ ID NO:2640), CYFQINNKC (SEQ ID NO:2641), CYFQINNKTC (SEQ ID NO:2642), CYFQINNKTGC (SEQ ID NO:2643), ENNKK (SEQ ID NO:2644), ENNKTK (SEQ ID NO:2645), ENNKTGK (SEQ ID NO:2646), EINNKK (SEQ ID NO:2647), EINNKTK (SEQ ID NO:2648), EINNKTGK (SEQ ID NO:2649), EQINNKK (SEQ ID NO:2650), EQINNKTK (SEQ ID NO:2651), EQINNKTGK (SEQ ID NO:2652), EFQINNKK (SEQ ID NO:2653), EFQINNKTK (SEQ ID NO:2654), EFQINNKTGK (SEQ ID NO:2655), EYFQINNKK (SEQ ID NO:2656), EYFQINNKTK (SEQ ID NO:2657), EYFQINNKTGK (SEQ ID NO:2658), KNNKD (SEQ ID NO:2659), KNNKTD (SEQ ID NO:2660), KNNKTGD (SEQ ID NO:2661), KINNKD (SEQ ID NO:2662), KINNKTD (SEQ ID NO:2663), KINNKTGD (SEQ ID NO:2664), KQINNKD (SEQ ID NO:2665), KQINNKTD (SEQ ID NO:2666), KQINNKTGD (SEQ ID NO:2667), KFQINNKD (SEQ ID NO:2668), KFQINNKTD (SEQ ID NO:2669), KFQINNKTGD (SEQ ID NO:2670), KYFQINNKD (SEQ ID NO:2671), KYFQINNKTD (SEQ ID NO:2672), KYFQINNKTGD (SEQ ID NO:2673), DNNKK (SEQ ID NO:2674), DNNKTK (SEQ ID NO:2675), DNNKTGK (SEQ ID NO:2676), DINNKK (SEQ ID NO:2677), DINNKTK (SEQ ID NO:2678), DINNKTGK (SEQ ID NO:2679), DQINNKK (SEQ ID NO:2680), DQINNKTK (SEQ ID NO:2681), DQINNKTGK (SEQ ID NO:2682), DFQINNKK (SEQ ID NO:2683), DFQINNKTK (SEQ ID NO:2684), DFQINNKTGK (SEQ ID NO:2685), DYFQINNKK (SEQ ID NO:2686), DYFQINNKTK (SEQ ID NO:2687), DYFQINNKTGK (SEQ ID NO:2688), KNNKE (SEQ ID NO:2689), KNNKTE (SEQ ID NO:2690), KNNKTGE (SEQ ID NO:2691), KINNKE (SEQ ID NO:2692), KINNKTE (SEQ ID NO:2693), KINNKTGE (SEQ ID NO:2694), KQINNKE (SEQ ID NO:2695), KQINNKTE (SEQ ID NO:2696), KQINNKTGE (SEQ ID NO:2697), KFQINNKE (SEQ ID NO:2698), KFQINNKTE (SEQ ID NO:2699), KFQINNKTGE (SEQ ID NO:2700), KYFQINNKE (SEQ ID NO:2701), KYFQINNKTE (SEQ ID NO:2702), KYFQINNKTGE (SEQ ID NO:2703), NNKTG (SEQ ID NO:2704), INNKT (SEQ ID NO:2705), INNKTG (SEQ ID NO:2706), QINNK (SEQ ID NO:2707), QINNKT (SEQ ID NO:2708), QINNKTG (SEQ ID NO:2709), FQINNK (SEQ ID NO:2710), FQINNKT (SEQ ID NO:2711), FQINNKTG (SEQ ID NO:2712), YFQINNK (SEQ ID NO:2713), YFQINNKT (SEQ ID NO:2714) and YFQINNKTG (SEQ ID NO:2715).

79. A polynucleotide encoding a modulating agent according to claim 75.

80. A modulating agent comprising an antibody or antigen-binding fragment thereof that:
(a) specifically binds to the LI-cadherin CAR sequence YFQINNKTG (SEQ ID NO:431); and
(b) modulates a LI-cadherin-mediated function.

81. A modulating agent according to any one of claims 1-4, wherein the agent comprises one or more protocadherin CAR sequences selected from the group consisting DLV, DLVT (SEQ ID NO:432), DLVTG (SEQ ID NO:433), LDLV (SEQ ID NO:434), LDLVT (SEQ ID NO:435), LDLVTG (SEQ ID NO:436), ALDLV (SEQ ID NO:437), ALDLVT (SEQ ID NO:438), ALDLVTG (SEQ ID NO:439), FALDLV (SEQ ID NO:440), FALDLVT (SEQ ID NO:441), FALDLVTG (SEQ ID NO:442), LFALDLV (SEQ ID NO:443), LFALDLVT (SEQ ID NO:444), LFALDLVTG (SEQ ID NO:445), NRD, NRDN (SEQ ID NO:446), NRDNG (SEQ ID NO:447), INRD (SEQ ID NO:448), INRDN (SEQ ID NO:449), INRDNG (SEQ ID NO:450), TINRD (SEQ ID NO:451), TINRDN (SEQ ID NO:452), TINRDNG (SEQ ID NO:453), FTINRD (SEQ ID NO:454), FTINRDN (SEQ ID NO:455), FTINRDNG (SEQ ID NO:456), YFTINRD (SEQ ID NO:457), YFTINRDN (SEQ ID NO:458), YFTINRDNG (SEQ ID NO:459), DPK, DPKT (SEQ ID NO:460), DPKTG (SEQ ID NO:461), IDPK (SEQ ID NO:462), IDPKT (SEQ ID NO:463), IDPKTG (SEQ ID NO:464), SIDPK (SEQ ID NO:465), SIDPKT (SEQ ID NO:466), SIDPKTG (SEQ ID NO:467), FSIDPK (SEQ ID NO:468), FSIDPKT (SEQ ID NO:469), FSIDPKTG (SEQ ID NO:470), LFSIDPK (SEQ ID NO:471), LFSIDPKT (SEQ ID NO:472), LFSIDPKTG (SEQ ID NO:473), DPS, DPSS (SEQ ID NO:474), DPSSG (SEQ ID NO:475), IDPS (SEQ ID NO:476), IDPSS (SEQ ID NO:477), IDPSSG (SEQ ID NO:478), EIDPS (SEQ ID NO:479), EIDPSS (SEQ ID NO:480), EIDPSSG (SEQ ID NO:481), FEIDPS (SEQ ID NO:482), FEIDPSS (SEQ ID NO:483), FEIDPS (SEQ ID NO:484), FEIDPSS (SEQ ID NO:485), FEIDPSSG (SEQ ID NO:486), LFEIDPS (SEQ ID NO:487), LFEIDPSS (SEQ ID NO:488) and LFEIDPSSG (SEQ ID NO:489).

82. A modulating agent according to claim 81, wherein the agent comprises a linear peptide having the sequence N-Ac-LFALDLVTG-NH₂ (SEQ ID NO:445), N-Ac-YFTINRDNG-NH₂ (SEQ ID NO:459), N-Ac-LFSIDPKTG-NH₂ (SEQ ID NO:473) or N-Ac-LFEIDPSSG-NH₂ (SEQ ID NO:489).

83. A modulating agent according to claim 81, wherein a protocadherin CAR sequence is present within a cyclic peptide.

84. A modulating agent according to claim 83, wherein the cyclic peptide comprises a sequence selected from the group consisting of CDLVC (SEQ ID NO:2716), CDLVTC (SEQ ID NO:2717), CDLVTGC (SEQ ID NO:2718), CLDLVC (SEQ ID NO:2719), CLDLVTC (SEQ ID NO:2720), CLDLVTGC (SEQ ID NO:2721), CALDLVC (SEQ ID NO:2722), CALDLVTC (SEQ ID NO:2723), CALDLVTGC (SEQ ID NO:2724), CFALDLVC (SEQ ID NO:2725), CFALDLVTC (SEQ ID NO:2726), CFALDLVTGC (SEQ ID NO:2727), CLFALDLVC (SEQ ID NO:2728), CLFALDLVTC (SEQ ID NO:2729), CLFALDLVTGC (SEQ ID NO:2730), CNRDC (SEQ ID NO:2731), CNRDNC (SEQ ID NO:2732), CNRDNGC (SEQ ID NO:2733), CINRDC (SEQ ID NO:2734), CINRDNC (SEQ ID NO:2735), CINRDNGC (SEQ ID NO:2736), CTINRDC (SEQ ID NO:2737), CTINRDNC (SEQ ID NO:2738), CTINRDNGC (SEQ ID NO:2739), CFTINRDC (SEQ ID NO:2740), CFTINRDNC (SEQ ID NO:2741), CFTINRDNGC (SEQ ID NO:2742), CYFTINRDC (SEQ ID NO:2743), CYFTINRDNC (SEQ ID NO:2744), CYFTINRDNGC (SEQ ID NO:2745), CDPSC (SEQ ID NO:2746), CDPSSC (SEQ ID NO:2747), CDPSSGC (SEQ ID NO:2748), CIDPSC (SEQ ID NO:2749), CIDPSSC (SEQ ID NO:2750), CIDPSSGC (SEQ ID NO:2751), CEIDPSC (SEQ ID NO:2752), CEIDPSSC (SEQ ID NO:2753), CEIDPSSGC (SEQ ID NO:2754), CFEIDPSC (SEQ ID NO:2755), CFEIDPSSC (SEQ ID NO:2756), CEIDPSSGC (SEQ ID NO:2757), CFEIDPSC (SEQ ID NO:2758), CFEIDPSSC (SEQ ID NO:2759), CFEIDPSSGC (SEQ ID NO:2760), CLFEIDPSC (SEQ ID NO:2761), CLFEIDPSSC (SEQ ID NO:2762), CLFEIDPSSGC (SEQ ID NO:2763), EDLVK (SEQ ID NO:2764), EDLVTK (SEQ ID NO:2765), EDLVTGK (SEQ ID NO:2766), ELDLVK (SEQ ID NO:2767), ELDLVTK (SEQ ID NO:2768), ELDLVTGK (SEQ ID NO:2769), EALDLVK (SEQ ID NO:2770), EALDLVTK (SEQ ID NO:2771), EALDLVTGK (SEQ ID NO:2772), EFALDLVK (SEQ ID NO:2773), EFALDLVTK (SEQ ID NO:2774), EFALDLVTGK (SEQ ID NO:2775), ELFALDLVK (SEQ ID NO:2776), ELFALDLVTK (SEQ ID NO:2777), ELFALDLVTGK (SEQ ID NO:2778), ENRDK (SEQ ID NO:2779), ENRDNK (SEQ ID NO:2780), ENRDNGK (SEQ ID NO:2781), EINRDK (SEQ ID NO:2782), EINRDNK (SEQ ID NO:2783), EINRDNGK (SEQ ID NO:2784), ETINRDK (SEQ ID NO:2785), ETINRDNK (SEQ ID NO:2786), ETINRDNGK (SEQ ID NO:2787), EFTINRDK (SEQ ID NO:2788), EFTINRDNK (SEQ ID NO:2789), EFTINRDNGK (SEQ ID NO:2790), EYFTINRDK (SEQ ID NO:2791), EYFTINRDNK (SEQ ID NO:2792), EYFTINRDNGK (SEQ ID NO:2793), EDPKK (SEQ ID NO:2794), EDPKTK (SEQ ID NO:2795), EDPKTGK (SEQ ID NO:2796), EIDPKK (SEQ ID NO:2797), EIDPKTK (SEQ ID NO:2798), EIDPKTGK (SEQ ID NO:2799), ESIDPKK (SEQ ID NO:2800), ESIDPKTK (SEQ ID NO:2801), ESIDPKTGK (SEQ ID NO:2802), EFSIDPKK (SEQ ID NO:2803), EFSIDPKTK (SEQ ID NO:2804), EFSIDPKTGK (SEQ ID NO:2805), ELFSIDPKK (SEQ ID NO:2806), ELFSIDPKTK (SEQ ID NO:2807), ELFSIDPKTGK (SEQ ID NO:2808), EDPSK (SEQ ID NO:2809), EDPSSK (SEQ ID NO:2810), EDPSSGK (SEQ ID NO:2811), EIDPSK (SEQ ID NO:2812), EIDPSSK (SEQ ID NO:2813), EIDPSSGK (SEQ ID NO:2814), EEIDPSK (SEQ ID NO:2815), EEIDPSSK (SEQ ID NO:2816), EEIDPSSGK (SEQ ID NO:2817), EFEIDPSK (SEQ ID NO:2818), EFEIDPSSK (SEQ ID NO:2819), EEIDPSSGK (SEQ ID NO:2820), EFEIDPSK (SEQ ID NO:2821), EFEIDPSSK (SEQ ID NO:2822), EFEIDPSSGK (SEQ ID NO:2823), ELFEIDPSK (SEQ ID NO:2824), ELFEIDPSSK (SEQ ID NO:2825), ELFEIDPSSGK (SEQ ID NO:2826), KDLVD (SEQ ID NO:2827), KDLVTD (SEQ ID NO:2828), KDLVTGD (SEQ ID NO:2829), KLDLVD (SEQ ID NO:2830), KLDLVTD (SEQ ID NO:2831), KLDLVTGD (SEQ ID NO:2832), KALDLVD (SEQ ID NO:2833), KALDLVTD (SEQ ID NO:2834), KALDLVTGD (SEQ ID NO:2835), KFALDLVD (SEQ ID NO:2836), KFALDLVTD (SEQ ID NO:2837), KFALDLVTGD (SEQ ID NO:2838), KLFALDLVD (SEQ ID NO:2839), KLFALDLVTD (SEQ ID NO:2840), KLFALDLVTGD (SEQ ID NO:2841), KNRDD (SEQ ID NO:2842), KNRDND (SEQ ID NO:2843), KNRDNGD (SEQ ID NO:2844), KINRDD (SEQ ID NO:2845), KINRDND (SEQ ID NO:2846), KINRDNGD (SEQ ID NO:2847), KTINRDD (SEQ ID NO:2848), KTINRDND (SEQ ID NO:2849), KTINRDNGD (SEQ ID NO:2850), KFTINRDD (SEQ ID NO:2851), KFTINRDND (SEQ ID NO:2852), KFTINRDNGD (SEQ ID NO:2853), KYFTINRDD (SEQ ID NO:2854), KYFTINRDND (SEQ ID NO:2855), KYFTINRDNGD (SEQ ID NO:2856), KDPKD (SEQ ID NO:2857), KDPKTD (SEQ ID NO:2858), KDPKTGD (SEQ ID NO:2859), KIDPKD (SEQ ID NO:2860), KIDPKTD (SEQ ID NO:2861), KIDPKTGD (SEQ ID NO:2862), KSIDPKD (SEQ ID NO:2863), KSIDPKTD (SEQ ID NO:2864), KSIDPKTGD (SEQ ID NO:2865), KFSIDPKD (SEQ ID NO:2866), KFSIDPKTD (SEQ ID NO:2867), KFSIDPKTGD (SEQ ID NO:2868), KLFSIDPKD (SEQ ID NO:2869), KLFSIDPKTD (SEQ ID NO:2870), KLFSIDPKTGD (SEQ ID NO:2871), KDPSD (SEQ ID NO:2872), KDPSSD (SEQ ID NO:2873), KDPSSGD (SEQ ID NO:2874), KIDPSD (SEQ ID NO:2875), KIDPSSD (SEQ ID NO:2876), KIDPSSGD (SEQ ID NO:2877), KEIDPSD (SEQ ID NO:2878), KEIDPSSD (SEQ ID NO:2879), KEIDPSSGD (SEQ ID NO:2880), KFEIDPSD (SEQ ID NO:2881), KFEIDPSSD (SEQ ID NO:2882), KFEIDPSSGD (SEQ ID NO:2886), KLFEIDPSD (SEQ ID NO:2887), KLFEIDPSSD (SEQ ID NO:2888), KLFEIDPSSGD (SEQ ID NO:2889), KDLVE (SEQ ID NO:2890), KDLVTE (SEQ ID NO:2891), KDLVTGE (SEQ ID NO:2892), KLDLVE (SEQ ID NO:2893), KLDLVTE (SEQ ID NO:2894), KLDLVTGE (SEQ ID NO:2895), KALDLVE (SEQ ID NO:2896), KALDLVTE (SEQ ID NO:2897), KALDLVTGE (SEQ ID NO:2898), KFALDLVE (SEQ ID NO:2899), KFALDLVTE (SEQ ID NO:2900), KFALDLVTGE (SEQ ID NO:2901), KLFALDLVE (SEQ ID NO:2902), KLFALDLVTE (SEQ ID NO:2903), KLFALDLVTGE (SEQ ID NO:2904), KNRDE (SEQ ID NO:2905), KNRDNE (SEQ ID NO:2906), KNRDNGE (SEQ ID NO:2907), KINRDE (SEQ ID NO:2908), KINRDNE (SEQ ID NO:2909), KINRDNGE (SEQ ID NO:2910), KTINRDE (SEQ ID NO:2911), KTINRDNE (SEQ ID NO:2912), KTINRDNGE (SEQ ID NO:2913), KFTINRDE (SEQ ID NO:2914), KFTINRDNE (SEQ ID NO:2915), KFTINRDNGE (SEQ ID NO:2916), KYFTINRDNE (SEQ ID NO:2917), KYFTINRDNE (SEQ ID NO:2918), KYFTINRDNGE (SEQ ID NO:2919), KDPKE (SEQ ID NO:2920), KDPKTE (SEQ ID NO:2921), KDPKTGE (SEQ ID NO:2922), KIDPKE (SEQ ID NO:2923), KIDPKTE (SEQ ID NO:2924), KIDPKTGE (SEQ ID NO:2925), KSIDPKE (SEQ ID NO:2926), KSIDPKTE (SEQ ID NO:2927), KSIDPKTGE (SEQ ID NO:2928), KFSIDPKE (SEQ ID NO:2929), KFSIDPKTE (SEQ ID NO:2930), KFSIDPKTGE (SEQ ID NO:2931), KLFSIDPKE (SEQ ID NO:2932), KLFSIDPKTE (SEQ ID NO:2933), KLFSIDPKTGE (SEQ ID NO:2934), KDPSE (SEQ ID NO:2935), KDPSSE (SEQ ID NO:2936), KDPSSGE (SEQ ID NO:2937), KIDPSE (SEQ ID NO:2938), KIDPSSE (SEQ ID NO:2939), KIDPSSGE (SEQ ID NO:2940), KEIDPSE (SEQ ID NO:2941), KEIDPSSE (SEQ ID NO:2942), KEIDPSSGE (SEQ ID NO:2943), KFEIDPSE (SEQ ID NO:2944), KFEIDPSSE (SEQ ID NO:2945), KFEIDPSSGE (SEQ ID NO:2949), KLFEIDPSE (SEQ ID NO:2950), KLFEIDPSSE (SEQ ID NO:2951), KLFEIDPSSGE (SEQ ID NO:2952), DDLVK (SEQ ID NO:2953), DDLVTK (SEQ ID NO:2954), DDLVTGK (SEQ ID NO:2955), DLDLVK (SEQ ID NO:2956), DLDLVTK (SEQ ID NO:2957), DLDLVTGK (SEQ ID NO:2958), DALDLVK (SEQ ID NO:2959), DALDLVTK (SEQ ID NO:2960), DALDLVTGK (SEQ ID NO:2961), DFALDLVK (SEQ ID NO:2962), DFALDLVTK (SEQ ID NO:2963), DFALDLVTGK (SEQ ID NO:2964), DLFALDLVK (SEQ ID NO:2965), DLFALDLVTK (SEQ ID NO:2966), DLFALDLVTGK (SEQ ID NO:2967), DNRDK (SEQ ID NO:2968), DNRDNK (SEQ ID NO:2969), DNRDNGK (SEQ ID NO:2970), DINRDK (SEQ ID NO:2971), DINRDNK (SEQ ID NO:2972), DINRDNGK (SEQ ID NO:2973), DTINRDK (SEQ ID NO:2974), DTINRDNK (SEQ ID NO:2975), DTINRDNGK (SEQ ID NO:2976), DFTINRDK (SEQ ID NO:2977), DFTINRDNK (SEQ ID NO:2978), DFTINRDNGK (SEQ ID NO:2979), DYFTINRDK (SEQ ID NO:2980), DYFTINRDNK (SEQ ID NO:2981), DYFTINRDNGK (SEQ ID NO:2982), DDPKK (SEQ ID NO:2983), DDPKTK (SEQ ID NO:2984), DDPKTGK (SEQ ID NO:2985), DIDPKK (SEQ ID NO:2986), DIDPKTK (SEQ ID NO:2987), DIDPKTGD (SEQ ID NO:2988), DSIDPKK (SEQ ID NO:2989), DSIDPKTK (SEQ ID NO:2990), DSIDPKTGK (SEQ ID NO:2991), DFSIDPKK (SEQ ID NO:2992), DFSIDPKTK (SEQ ID NO:2993), DFSIDPKTGK (SEQ ID NO:2994), DLFSIDPKK (SEQ ID NO:2995), DLFSIDPKTK (SEQ ID NO:2996), DLFSIDPKTGK (SEQ ID NO:2997), DDPSK (SEQ ID NO:2998), DDPSSK (SEQ ID NO:2999), DDPSSGK (SEQ ID NO:3000), DIDPSK (SEQ ID NO:3001), DIDPSSK (SEQ ID NO:3002), DIDPSSGK (SEQ ID NO:3003), DEIDPSK (SEQ ID NO:3004), DEIDPSSK (SEQ ID NO:3005), DEIDPSSGK (SEQ ID NO:3006), DFEIDPSK (SEQ ID NO:3007), DFEIDPSSK (SEQ ID NO:3008), DFEIDPSSGK (SEQ ID NO:3012), DLFEIDPSK (SEQ ID NO:3013), DLFEIDPSSK (SEQ ID NO:3014), DLFEIDPSSGK (SEQ ID NO:3015), DLVTG (SEQ ID NO:3016), LDLVT (SEQ ID NO:3017), LDLVTG (SEQ ID NO:3018), ALDLV (SEQ ID NO:3019), ALDLVT (SEQ ID NO:3020), ALDLVTG (SEQ ID NO:3021), FALDLV (SEQ ID NO:3022), FALDLVTC (SEQ ID NO:3023), FALDLVTG (SEQ ID NO:3024), LFALDLV (SEQ ID NO:3025), LFALDLVT (SEQ ID NO:3026), LFALDLVTG (SEQ ID NO:3027), NRDNG (SEQ ID NO:3028), INRDN (SEQ ID NO:3029), INRDNG (SEQ ID NO:3030), TINRD (SEQ ID NO:3031), TINRDN (SEQ ID NO:3032), TINRDNG (SEQ ID NO:3033), FTINRD (SEQ ID NO:3034), FTINRDN (SEQ ID NO:3035), FTINRDNG (SEQ ID NO:3036), YFTINRD (SEQ ID NO:3037), YFTINRDN (SEQ ID NO:3038), YFTINRDNG (SEQ ID NO:3039), DPKTG (SEQ ID NO:3040), IDPKT (SEQ ID NO:3041), IDPKTG (SEQ ID NO:3042), SIDPK (SEQ ID NO:3043), SIDPKT (SEQ ID NO:3044), SIDPKTG (SEQ ID NO:3045), FSIDPK (SEQ ID NO:3046), FSIDPKT (SEQ ID NO:3047), FSIDPKTG (SEQ ID NO:3048), LFSIDPK (SEQ ID NO:3049), LFSIDPKT (SEQ ID NO:3050), LFSIDPKTG (SEQ ID NO:3051), DPSSG (SEQ ID NO:3052), IDPSS (SEQ ID NO:3053), IDPSSG (SEQ ID NO:3054), EIDPSS (SEQ ID NO:3056), EIDPSSG (SEQ ID NO:3057), FEIDPS (SEQ ID NO:3058), FEIDPSS (SEQ ID NO:3059), EIDPSSG (SEQ ID NO:3060), FEIDPS (SEQ ID NO:3061), FEIDPSSG (SEQ ID NO:3062), LFEIDPS (SEQ ID NO:3063), LFEIDPSS (SEQ ID NO:3064) and LFEIDPSSG (SEQ ID NO:3065).

85. A polynucleotide encoding a modulating agent according to claim 81.

86. A modulating agent comprising an antibody or antigen-binding fragment thereof that:
(a) specifically binds to a protocadherin CAR sequence selected from the group consisting of LFALDLVTG (SEQ ID NO:445), YFTINRDNG (SEQ ID NO:459), LFSIDPKTG (SEQ ID NO:473) and LFEIDPSSG (SEQ ID NO:489); and
(b) modulates a protocadherin-mediated function.

87. A modulating agent according to any one of claims 1-4, wherein the agent comprises one or more desmoglein CAR sequences selected from the group consisting NQK, NQKT (SEQ ID NO:490), NQKTG (SEQ ID NO:491), INQK (SEQ ID NO:492), INQKT (SEQ ID NO:493), INQKTG (SEQ ID NO:494), VINQK (SEQ ID NO:495), VINQKT (SEQ ID NO:496), VINQKTG (SEQ ID NO:497), FVINQK (SEQ ID NO:498), FVINQKT (SEQ ID NO:499), FVINQKTG (SEQ ID NO:500), IFVINQK (SEQ ID NO:501), IFVINQKT (SEQ ID NO:502), IFVINQKTG (SEQ ID NO:503), NRN, NRNT (SEQ ID NO:504), NRNTG (SEQ ID NO:505), INRN (SEQ ID NO:506), INRNT (SEQ ID NO:507), INRNTG (SEQ ID NO:508), IINRN (SEQ ID NO:509), IINRNT (SEQ ID NO:510), IINRNTG (SEQ ID NO:511), FIINRN (SEQ ID NO:512), FIINRNT (SEQ ID NO:513), FIINRNTG (SEQ ID NO:514), MFIINRN (SEQ ID NO:515), MFIINRNT (SEQ ID NO:516), MFIINRNTG (SEQ ID NO:517), NKD, NKDT (SEQ ID NO:518), NKDTG (SEQ ID NO:519), LNKD (SEQ ID NO:520), LNKDT (SEQ ID NO:521), LNKDTG (SEQ ID NO:522), YLNKD (SEQ ID NO:523), YLNKDT (SEQ ID NO:524), YLNKDTG (SEQ ID NO:525), FYLNKD (SEQ ID NO:526), FYLNKDT (SEQ ID NO:527), FYLNKDTG (SEQ ID NO:528), VFYLNKD (SEQ ID NO:529), VFYLNKDT (SEQ ID NO:530) and VFYLNKDTG (SEQ ID NO:531).

88. A modulating agent according to claim 87, wherein the agent comprises a linear peptide having the sequence N-Ac-IFVINQKTG-NH₂ (SEQ ID NO:503), N-Ac-MFIINRNTG-NH₂ (SEQ ID NO:517) or N-Ac-VFYLNKDTG-NH₂ (SEQ ID NO:531).

89. A modulating agent according to claim 87, wherein a desmoglein CAR sequence is present within a cyclic peptide.

90. A modulating agent according to claim 89, wherein the cyclic peptide comprises a sequence selected from the group consisting of CNQKC (SEQ ID NO:3066), CNQKTC (SEQ ID NO:3067), CNQKTGC (SEQ ID NO:3068), CINQKC (SEQ ID NO:3069), CINQKTC (SEQ ID NO:3070), CINQKTGC (SEQ ID NO:3071), CVINQKC (SEQ ID NO:3072), CVINQKTC (SEQ ID NO:3073), CVINQKTGC (SEQ ID NO:3074), CFVINQKC (SEQ ID NO:3075), CFVINQKTC (SEQ ID NO:3076), CFVINQKTGC (SEQ ID NO:3077), CIFVINQKC (SEQ ID NO:3078), CIFVINQKTC (SEQ ID NO:3079), CIFVINQKTGC (SEQ ID NO:3080), CNRNC (SEQ ID NO:3081), CNRNTC (SEQ ID NO:3082), CNRNTGC (SEQ ID NO:3083), CINRNC (SEQ ID NO:3084), CINRNTC (SEQ ID NO:3085), CINRNTGC (SEQ ID NO:3086), CIINRNC (SEQ ID NO:3087), CIINRNTC (SEQ ID NO:3088), CIINRNTGC (SEQ ID NO:3089), CFIINRNC (SEQ ID NO:3090), CFIINRNTC (SEQ ID NO:3091), CFIINRNTGC (SEQ ID NO:3092), CMFIINRNC (SEQ ID NO:3093), CMFIINRNTC (SEQ ID NO:3094), CMFIINRNTGC (SEQ ID NO:3095), CNKDC (SEQ ID NO:3096), CNKDTC (SEQ ID NO:3097), CNKDTGC (SEQ ID NO:3098), CLNKDC (SEQ ID NO:3099), CLNKDTC (SEQ ID NO:3100), CLNKDTGC (SEQ ID NO:3101), CYLNKDC (SEQ ID NO:3102), CYLNKDTC (SEQ ID NO:3103), CYLNKDTGC (SEQ ID NO:3104), CFYLNKDC (SEQ ID NO:3105), CFYLNKDTC (SEQ ID NO:3106), CFYLNKDTGC (SEQ ID NO:3107), CVFYLNKDC (SEQ ID NO:3108), CVFYLNKDTC (SEQ ID NO:3109), CVFYLNKDTGC (SEQ ID NO:3110), ENQKK (SEQ ID NO:3111), ENQKTK (SEQ ID NO:3112), ENQKTGK (SEQ ID NO:3113), EINQKK (SEQ ID NO:3114), EINQKTK (SEQ ID NO:3115), EINQKTGK (SEQ ID NO:3116), EVINQKK (SEQ ID NO:3117), EVINQKTK (SEQ ID NO:3118), EVINQKTGK (SEQ ID NO:3119), EFVINQKK (SEQ ID NO:3120), EFVINQKTK (SEQ ID NO:3121), EFVINQKTGK (SEQ ID NO:3122), EIFVINQKK (SEQ ID NO:3123), EIFVINQKTK (SEQ ID NO:3124), EIFVINQKTGK (SEQ ID NO:3125), ENRNK (SEQ ID NO:3126), ENRNTK (SEQ ID NO:3127), ENRNTGK (SEQ ID NO:3128), EINRNK (SEQ ID NO:3129), EINRNTK (SEQ ID NO:3130), EINRNTGK (SEQ ID NO:3131), EIINRNK (SEQ ID NO:3132); EIINRNTK (SEQ ID NO:3133), EIINRNTGK (SEQ ID NO:3134), EFIINRNK (SEQ ID NO:3135), EFIINRNTK (SEQ ID NO:3136), EFIINRNTGK (SEQ ID NO:3137), EMFIINRNK (SEQ ID NO:3138), EMFIINRNTK (SEQ ID NO:3139), EMFIINRNTGK (SEQ ID NO:3140), ENKDK (SEQ ID NO:3141), ENKDTK (SEQ ID NO:3142), ENKDTGK (SEQ ID NO:3143), ELNKDK (SEQ ID NO:3144), ELNKDTK (SEQ ID NO:3145), ELNKDTGK (SEQ ID NO:3146), EYLNKDK (SEQ ID NO:3147), EYLNKDTK (SEQ ID NO:3148), EYLNKDTGK (SEQ ID NO:3149), EFYLNKDK (SEQ ID NO:3150), EFYLNKDTK (SEQ ID NO:3151), EFYLNKDTGK (SEQ ID NO:3152), EVFYLNKDK (SEQ ID NO:3153), EVFYLNKDTK (SEQ ID NO:3154), EVFYLNKDTGK (SEQ ID NO:3155), KNQKD (SEQ ID NO:3156), KNQKTD (SEQ ID NO:3157), KNQKTGD (SEQ ID NO:3158), KINQKD (SEQ ID NO:3159), KINQKTD (SEQ ID NO:3160), KINQKTGD (SEQ ID NO:3161), KVINQKD (SEQ ID NO:3162), KVINQKTD (SEQ ID NO:3163), KVINQKTGD (SEQ ID NO:3164), KFVINQKD (SEQ ID NO:3165), KFVINQKTD (SEQ ID NO:3166), KFVINQKTGD (SEQ ID NO:3167), KIFVINQKD (SEQ ID NO:3168), KIFVINQKTD (SEQ ID NO:3169), KIFVINQKTGD (SEQ ID NO:3170), KNRND (SEQ ID NO:3171), KNRNTD (SEQ ID NO:3172), KNRNTGD (SEQ ID NO:3173), KINRND (SEQ ID NO:3174), KINRNTD (SEQ ID NO:3175), KINRNTGD (SEQ ID NO:3176), KIINRND (SEQ ID NO:3177), KIINRNTD (SEQ ID NO:3178), KIINRNTGD (SEQ ID NO:3179), KFIINRND (SEQ ID NO:3180), KFIINRNTD (SEQ ID NO:3181), KFIINRNTGD (SEQ ID NO:3182), KMFIINRND (SEQ ID NO:3183), KMFIINRNTD (SEQ ID NO:3184), KMFIINRNTGD (SEQ ID NO:3185), KNKDD (SEQ ID NO:3186), KNKDTD (SEQ ID NO:3187), KNKDTGD (SEQ ID NO:3188), KLNKDD (SEQ ID NO:3189), KLNKDTD (SEQ ID NO:3190) KLNKDTGD (SEQ ID NO:3191), KYLNKDD (SEQ ID NO:3192), KYLNKDTD (SEQ ID NO:3193), KYLNKDTGD (SEQ ID NO:3194), KFYLNKDD (SEQ ID NO:3195), KFYLNKDTD (SEQ ID NO:3196), KFYLNKDTGD (SEQ ID NO:3197), KVFYLNKDD (SEQ ID NO:3198), KVFYLNKDTD (SEQ ID NO:3199), KVFYLNKDTGD (SEQ ID NO:3200), DNQKK (SEQ ID NO:3201), DNQKTK (SEQ ID NO:3202), DNQKTGK (SEQ ID NO:3203), DINQKK (SEQ ID NO:3204), DINQKTK (SEQ ID NO:3205), DINQKTGK (SEQ ID NO:3206), DVINQKK (SEQ ID NO:3207), DVINQKTK (SEQ ID NO:3208), DVINQKTGK (SEQ ID NO:3209), DFVINQKK (SEQ ID NO:3210), DFVINQKTK (SEQ ID NO:3211), DFVINQKTGK (SEQ ID NO:3212), DIFVINQKK (SEQ ID NO:3213), DIFVINQKTK (SEQ ID NO:3214), DIFVINQKTGK (SEQ ID NO:3215), DNRNK (SEQ ID NO:3216), DNRNTK (SEQ ID NO:3217), DNRNTGK (SEQ ID NO:3218), DINRNK (SEQ ID NO:3219), DINRNTK (SEQ ID NO:3220), DINRNTGK (SEQ ID NO:3221), DIINRNK (SEQ ID NO:3222), DIINRNTK (SEQ ID NO:3223), DIINRNTGK (SEQ ID NO:3224), DFIINRNK (SEQ ID NO:3225), DFIINRNTK (SEQ ID NO:3226), DFIINRNTGK (SEQ ID NO:3227), DMFIINRNK (SEQ ID NO:3228), DMFIINRNTK (SEQ ID NO:3229), DMFIINRNTGK (SEQ ID NO:3230), DNKDK (SEQ ID NO:3231), DNKDTK (SEQ ID NO:3232), DNKDTGK (SEQ ID NO:3233), DLNKDK (SEQ ID NO:3234), DLNKDTK (SEQ ID NO:3235), DLNKDTGK (SEQ ID NO:3236), DYLNKDK (SEQ ID NO:3237), DYLNKDTK (SEQ ID NO:3238), DYLNKDTGK (SEQ ID NO:3239), DFYLNKDK (SEQ ID NO:3240), DFYLNKDTK (SEQ ID NO:3241), DFYLNKDTGK (SEQ ID NO:3242), DVFYLNKDK (SEQ ID NO:3243), DVFYLNKDTK (SEQ ID NO:3244), DVFYLNKDTGK (SEQ ID NO:3245), KKNQKE (SEQ ID NO:3246), KNQKTE (SEQ ID NO:3247), KNQKTGE (SEQ ID NO:3248), KINQKE (SEQ ID NO:3249), KINQKTE (SEQ ID NO:3250), KINQKTGE (SEQ ID NO:3251), KVINQKE (SEQ ID NO:3252), KVINQKTE (SEQ ID NO:3253), KVINQKTGE (SEQ ID NO:3254), KFVINQKE (SEQ ID NO:3255), KFVINQKTE (SEQ ID NO:3256), KFVINQKTGE (SEQ ID NO:3257), KIFVINQKE (SEQ ID NO:3258), KIFVINQKTE (SEQ ID NO:3259), KIFVINQKTGE (SEQ ID NO:3260), KNRNE (SEQ ID NO:3261), KNRNTE (SEQ ID NO:3262), KNRNTGE (SEQ ID NO:3263), KINRNE (SEQ ID NO:3264), KINRNTE (SEQ ID NO:3265), KINRNTGE (SEQ ID NO:3266), KIINRNE (SEQ ID NO:3267), KIINRNTE (SEQ ID NO:3268), KIINRNTGE (SEQ ID NO:3269), KFIINRNE (SEQ ID NO:3270), KFIINRNTE (SEQ ID NO:3271), KFIINRNTGE (SEQ ID NO:3272), KMFIINRNE (SEQ ID NO:3273), KMFIINRNTE (SEQ ID NO:3274), KMFIINRNTGE (SEQ ID NO:3275), KNKDE (SEQ ID NO:3276), KNKDTE (SEQ ID NO:3277), KNKDTGE (SEQ ID NO:3278), KLNKDE (SEQ ID NO:3279), KLNKDTE (SEQ ID NO:3280), KLNKDTGE (SEQ ID NO:3281), KYLNKDE (SEQ ID NO:3282), KYLNKDTE (SEQ ID NO:3283), KYLNKDTGE (SEQ ID NO:3284), KFYLNKDE (SEQ ID NO:3285), KFYLNKDTE (SEQ ID NO:3286), KFYLNKDTGE (SEQ ID NO:3287), KVFYLNKDE (SEQ ID NO:3288), KVFYLNKDTE (SEQ ID NO:3289), KVFYLNKDTGE (SEQ ID NO:3290), NQKTG (SEQ ID NO:3291), INQKT (SEQ ID NO:3292), INQKTG (SEQ ID NO:3293), VINQK (SEQ ID NO:3294), VINQKT (SEQ ID NO:3295), VINQKTG (SEQ ID NO:3296), FVINQK (SEQ ID NO:3297), FVINQKT (SEQ ID NO:3298), FVINQKTG (SEQ ID NO:3299), IFVINQK (SEQ ID NO:3300), IFVINQKT (SEQ ID NO:3301), IFVINQKTG (SEQ ID NO:3302), NRNTG (SEQ ID NO:3303), INRNT (SEQ ID NO:3304), INRNTG (SEQ ID NO:3305), IINRN (SEQ ID NO:3306), IINRNT (SEQ ID NO:3307), IINRNTG (SEQ ID NO:3308), FIINRN (SEQ ID NO:3309), FIINRNT (SEQ ID NO:3310), FIINRNTG (SEQ ID NO:3311), MFIINRN (SEQ ID NO:3312), MFIINRNT (SEQ ID NO:3313), MFIINRNTG (SEQ ID NO:3314), NKDTG (SEQ ID NO:3315), LNKDT (SEQ ID NO:3316), LNKDTG (SEQ ID NO:3317), YLNKD (SEQ ID NO:3318), YLNKDT (SEQ ID NO:3319), YLNKDTG (SEQ ID NO:3320), FYLNKD (SEQ ID NO:3321), FYLNKDT (SEQ ID NO:3322), FYLNKDTG (SEQ ID NO:3323), VFYLNKD (SEQ ID NO:3324), VFYLNKDT (SEQ ID NO:3325) and VFYLNKDTG (SEQ ID NO:3326).

91. A polynucleotide encoding a modulating agent according to claim 87.

92. A modulating agent comprising an antibody or antigen-binding fragment thereof that:
(a) specifically binds to a desmoglein CAR sequence selected from the group consisting of IFVINQKTG (SEQ ID NO:503), MFIINRNTG (SEQ ID NO:517) and VFYLNKDTG (SEQ ID NO:531); and
(b) modulates a desmoglein-mediated function.

93. A modulating agent according to any one of claims 1-4, wherein the agent comprises one or more desmocollin CAR sequences selected from the group consisting EKD, EKDT (SEQ ID NO:532), EKDTG (SEQ ID NO:533), IEKD (SEQ ID NO:534), IEKDT (SEQ ID NO:535), IEKDTG (SEQ ID NO:536), YIEKD (SEQ ID NO:537), YIEKDT (SEQ ID NO:538), YIEKDTG (SEQ ID NO:539), FYIEKD (SEQ ID NO:540), FYIEKDT (SEQ ID NO:541), FYIEKDTG (SEQ ID NO:542), LFYIEKD (SEQ ID NO:543), LFYIEKDT (SEQ ID NO:544), LFYIEKDTG (SEQ ID NO:545), ERD, ERDT (SEQ ID NO:546), ERDTG (SEQ ID NO:547), VERD (SEQ ID NO:548), VERDT (SEQ ID NO:549), VERDTG (SEQ ID NO:550), YVERD (SEQ ID NO:551), YVERDT (SEQ ID NO:552), YVERDTG (SEQ ID NO:553), FYVERD (SEQ ID NO:554), FYVERDT (SEQ ID NO:555), FYVERDTG (SEQ ID NO:556), LFYVERD (SEQ ID NO:557), LFYVERDT (SEQ ID NO:558), LFYVERDTG (SEQ ID NO:559), IERD (SEQ ID NO:560), IERDT (SEQ ID NO:561), IERDTG (SEQ ID NO:562), YIERD (SEQ ID NO:563), YIERDT (SEQ ID NO:564), YIERDTG (SEQ ID NO:565), FYIERD (SEQ ID NO:566), FYIERDT (SEQ ID NO:567), FYIERDTG (SEQ ID NO:568), LFYIERD (SEQ ID NO:569), LFYIERDT (SEQ ID NO:570) and LFYIERDTG (SEQ ID NO:571).

94. A modulating agent according to claim 93, wherein the agent comprises a linear peptide having the sequence N-Ac-LFYIEKDTG-NH₂ (SEQ ID NO:545), N-Ac-LFYVERDTG-NH₂ (SEQ ID NO:559) or N-Ac-LFYIERDTG-NH₂ (SEQ ID NO:571).

95. A modulating agent according to claim 93, wherein a desmocollin CAR sequence is present within a cyclic peptide.

96. A modulating agent according to claim 95, wherein the cyclic peptide comprises a sequence selected from the group consisting of CEKDC (SEQ ID NO:3327), CEKDTC (SEQ ID NO:3328), CEKDTGC (SEQ ID NO:3329), CIEKDC (SEQ ID NO:3330), CIEKDTC (SEQ ID NO:3331), CIEKDTGC (SEQ ID NO:3332), CYIEKDC (SEQ ID NO:3333), CYIEKDTC (SEQ ID NO:3334), CYIEKDTGC (SEQ ID NO:3335), CFYIEKDC (SEQ ID NO:3336), CFYIEKDTC (SEQ ID NO:3337), CFYIEKDTGC (SEQ ID NO:3338), CLFYIEKDC (SEQ ID NO:3339), CLFYIEKDTC (SEQ ID NO:3340), CLFYIEKDTGC (SEQ ID NO:3341), CERDC (SEQ ID NO:3342), CERDTC (SEQ ID NO:3343), CERDTGC (SEQ ID NO:3344), CVERDC (SEQ ID NO:3345), CVERDTC (SEQ ID NO:3346), CVERDTGC (SEQ ID NO:3347), CYVERDC (SEQ ID NO:3348), CYVERDTC (SEQ ID NO:3349), CYVERDTGC (SEQ ID NO:3350), CFYVERDC (SEQ ID NO:3351), CFYVERDTC (SEQ ID NO:3352), CFYVERDTGC (SEQ ID NO:3353), CLFYVERDC (SEQ ID NO:3354), CLFYVERDTC (SEQ ID NO:3355), CLFYVERDTGC (SEQ ID NO:3356), CIERDC (SEQ ID NO:3357), CIERDTC (SEQ ID NO:3358), CIERDTGC (SEQ ID NO:3359), CYIERDC (SEQ ID NO:3360), CYIERDTC (SEQ ID NO:3361), CYIERDTGC (SEQ ID NO:3362), CFYIERDC (SEQ ID NO:3363), CFYIERDTC (SEQ ID NO:3364), CFYIERDTGC (SEQ ID NO:3365), CLFYIERDC (SEQ ID NO:3366), CLFYIERDTC (SEQ ID NO:3367), CLFYIERDTGC (SEQ ID NO:3368), EEKDK (SEQ ID NO:3369), EEKDTK (SEQ ID NO:3370), EEKDTGK (SEQ ID NO:3371), EIEKDK (SEQ ID NO:3372), EIEKDTK (SEQ ID NO:3373), EIEKDTGK (SEQ ID NO:3374), EYIEKDK (SEQ ID NO:3375), EYIEKDTK (SEQ ID NO:3376), EYIEKDTGK (SEQ ID NO:3377), EFYIEKDK (SEQ ID NO:3378), EFYIEKDTK (SEQ ID NO:3379), EFYIEKDTGK (SEQ ID NO:3380), ELFYIEKDK (SEQ ID NO:3381), ELFYIEKDTK (SEQ ID NO:3382), ELFYIEKDTGK (SEQ ID NO:3383), EERDK (SEQ ID NO:3384), EERDTK (SEQ ID NO:3385), EERDTGK (SEQ ID NO:3386), EVERDK (SEQ ID NO:3387), EVERDTK (SEQ ID NO:3388), EVERDTGK (SEQ ID NO:3389), EYVERDK (SEQ ID NO:3390), YVERDTK (SEQ ID NO:3391), EYVERDTGK (SEQ ID NO:3392), EFYVERDK (SEQ ID NO:3393), EFYVERDTK (SEQ ID NO:3394), EFYVERDTGK (SEQ ID NO:3395), ELFYVERDK (SEQ ID NO:3396), ELFYVERDTK (SEQ ID NO:3397), ELFYVERDTGK (SEQ ID NO:3398), EIERDK (SEQ ID NO:3399), EIERDTK (SEQ ID NO:3400), EIERDTGK (SEQ ID NO:3401), EYIERDK (SEQ ID NO:3402), EYIERDTK (SEQ ID NO:3403), EYIERDTGK (SEQ ID NO:3404), EFYIERDK (SEQ ID NO:3405), EFYIERDTK (SEQ ID NO:3406), EFYIERDTGK (SEQ ID NO:3407), ELFYIERDK (SEQ ID NO:3408), ELFYIERDTK (SEQ ID NO:3409), ELFYIERDTGK (SEQ ID NO:3410), KEKDD (SEQ ID NO:3411), KEKDTD (SEQ ID NO:3412), KEKDTGD (SEQ ID NO:3413), KIEKDD (SEQ ID NO:3414), KIEKDTD (SEQ ID NO:3415), KIEKDTGD (SEQ ID NO:3416), KYIEKDD (SEQ ID NO:3417), KYIEKDTD (SEQ ID NO:3418), KYIEKDTGD (SEQ ID NO:3419), KFYIEKDD (SEQ ID NO:3420), KFYIEKDTD (SEQ ID NO:3421), KFYIEKDTGD (SEQ ID NO:3422), KLFYIEKDD (SEQ ID NO:3423), KLFYIEKDTD (SEQ ID NO:3424), KLFYIEKDTGD (SEQ ID NO:3425), KERDD (SEQ ID NO:3426), KERDTD (SEQ ID NO:3427), KERDTGD (SEQ ID NO:3428), KVERDD (SEQ ID NO:3429), KVERDTD (SEQ ID NO:3430), KVERDTGD (SEQ ID NO:3431), KYVERDD (SEQ ID NO:3432), KYVERDTD (SEQ ID NO:3433), KYVERDTGD (SEQ ID NO:3434), KFYVERDD (SEQ ID NO:3435), KFYVERDTD (SEQ ID NO:3436), KFYVERDTGD (SEQ ID NO:3437), KLFYVERDD (SEQ ID NO:3438), KLFYVERDTD (SEQ ID NO:3439), KLFYVERDTGD (SEQ ID NO:3440), KIERDD (SEQ ID NO:3441), KIERDTD (SEQ ID NO:3442), KIERDTGD (SEQ ID NO:3443), KYIERD (SEQ ID NO:3444), KYIERDTD (SEQ ID NO:3445), KYIERDTGD (SEQ ID NO:3446), KFYIERDD (SEQ ID NO:3447), KFYIERDTD (SEQ ID NO:3448), KFYIERDTGD (SEQ ID NO:3449), KLFYIERDD (SEQ ID NO:3450), KLFYIERDTD (SEQ ID NO:3451), KLFYIERDTGD (SEQ ID NO:3452), DEKDK (SEQ ID NO:3453), DEKDTK (SEQ ID NO:3454), DEKDTGK (SEQ ID NO:3455), DIEKDK (SEQ ID NO:3456), DIEKDTK (SEQ ID NO:3457), DIEKDTGK (SEQ ID NO:3458), DYIEKDK (SEQ ID NO:3459), DYIEKDTK (SEQ ID NO:3460), DYIEKDTGK (SEQ ID NO:3461), DFYIEKDK (SEQ ID NO:3462), DFYIEKDTK (SEQ ID NO:3463), DFYIEKDTGK (SEQ ID NO:3464), DLFYIEKDK (SEQ ID NO:3465), DLFYIEKDTK (SEQ ID NO:3466), DLFYIEKDTGK (SEQ ID NO:3467), DERDK (SEQ ID NO:3468), DERDTK (SEQ ID NO:3469), DERDTGK (SEQ ID NO:3470), DVERDK (SEQ ID NO:3471), DVERDTK (SEQ ID NO:3472), DVERDTGK (SEQ ID NO:3473), DYVERDK (SEQ ID NO:3474), DYVERDTK (SEQ ID NO:3475), DYVERDTGK (SEQ ID NO:3476), DFYVERDK (SEQ ID NO:3477), DFYVERDTK (SEQ ID NO:3478), DFYVERDTGK (SEQ ID NO:3479), DLFYVERDK (SEQ ID NO:3480), DLFYVERDTK (SEQ ID NO:3481), DLFYVERDTGK (SEQ ID NO:3482), DIERDK (SEQ ID NO:3483), DIERDTK (SEQ ID NO:3484), DIERDTGK (SEQ ID NO:3485), DYIERDK (SEQ ID NO:3486), DYIERDTK (SEQ ID NO:3487), DYIERDTGK (SEQ ID NO:3488), DFYIERDK (SEQ ID NO:3489), DFYIERDTK (SEQ ID NO:3490), DFYIERDTGK (SEQ ID NO:3491), DLFYIERDK (SEQ ID NO:3492), DLFYIERDTK (SEQ ID NO:3493), DLFYIERDTGK (SEQ ID NO:3494), KEKDE (SEQ ID NO:3495), KEKDTE (SEQ ID NO:3496), KEKDTGE (SEQ ID NO:3497), KIEKDE (SEQ ID NO:3498), KIEKDTE (SEQ ID NO:3499), KIEKDTGE (SEQ ID NO:3500), KYIEKDE (SEQ ID NO:3501), KYIEKDTE (SEQ ID NO:3502), KYIEKDTGE (SEQ ID NO:3503), KFYIEKDE (SEQ ID NO:3504), KFYIEKDTE (SEQ ID NO:3505), KFYIEKDTGE (SEQ ID NO:3506), KLFYIEKDE (SEQ ID NO:3507), KLFYIEKDTE (SEQ ID NO:3508), KLFYIEKDTGE (SEQ ID NO:3509), KERDE (SEQ ID NO:3510), KERDTE (SEQ ID NO:3511), KERDTGE (SEQ ID NO:3512), KVERDE (SEQ ID NO:3513), KVERDTE (SEQ ID NO:3514), KVERDTGE (SEQ ID NO:3515), KYVERDE (SEQ ID NO:3516), KYVERDTE (SEQ ID NO:3517), KYVERDTGE (SEQ ID NO:3518), KFYVERDE (SEQ ID NO:3519), KFYVERDTE (SEQ ID NO:3520), KFYVERDTGE (SEQ ID NO:3521), KLFYVERDE (SEQ ID NO:3522), KLFYVERDTE (SEQ ID NO:3523), KLFYVERDTGE (SEQ ID NO:3524), KIERDE (SEQ ID NO:3525), KIERDTE (SEQ ID NO:3526), KIERDTGE (SEQ ID NO:3527), KYIERDE (SEQ ID NO:3528), KYIERDTE (SEQ ID NO:3529), KYIERDTGE (SEQ ID NO:3530), KFYIERDE (SEQ ID NO:3531), KFYIERDTE (SEQ ID NO:3532), KFYIERDTGE (SEQ ID NO:3533), KLFYIERDE (SEQ ID NO:3534), KLFYIERDTE (SEQ ID NO:3535), KLFYIERDTGE (SEQ ID NO:3536), EKDTG (SEQ ID NO:3537), IEKDT (SEQ ID NO:3538), IEKDTG (SEQ ID NO:3539), YIEKD (SEQ ID NO:3540), YIEKDT (SEQ ID NO:3541), YIEKDTG (SEQ ID NO:3542), FYIEKD (SEQ ID NO:3543), FYIEKDT (SEQ ID NO:3544), FYIEKDTG (SEQ ID NO:3545), LFYIEKD (SEQ ID NO:3546), LFYIEKDT (SEQ ID NO:3547), LFYIEKDTG (SEQ ID NO:3548), ERDTG (SEQ ID NO:3549), VERDT (SEQ ID NO:3550), VERDTG (SEQ ID NO:3551), YVERD (SEQ ID NO:3552), YVERDT (SEQ ID NO:3553), YVERDTG (SEQ ID NO:3554), FYVERD (SEQ ID NO:3555), FYVERDT (SEQ ID NO:3556), FYVERDTG (SEQ ID NO:3557), LFYVERD (SEQ ID NO:3558), LFYVERDT (SEQ ID NO:3559), LFYVERDTG (SEQ ID NO:3560), IERDT (SEQ ID NO:3561), IERDTG (SEQ ID NO:3562), YIERD (SEQ ID NO:3563), YIERDT (SEQ ID NO:3564), YIERDTG (SEQ ID NO:3565), FYIERD (SEQ ID NO:3566), FYIERDT (SEQ ID NO:3567), FYIERDTG (SEQ ID NO:3568), LFYIERD (SEQ ID NO:3569), LFYIERDT (SEQ ID NO:3570) and LFYIERDTG (SEQ ID NO:3571).

97. A polynucleotide encoding a modulating agent according to claim 93.

98. A modulating agent comprising an antibody or antigen-binding fragment thereof that:
(a) specifically binds to a desmocollin CAR sequence selected from the group consisting of LFYIEKDTG (SEQ ID NO:545), LFYVERDTG (SEQ ID NO:559) and LFYIERDTG (SEQ ID NO:571); and
(b) modulates a desmocollin-mediated function.

99. A modulating agent according to any one of claims 1-4, wherein the agent comprises one or more cadherin-related neuronal receptor CAR sequences selected from the group consisting of DPV, DPVS (SEQ ID NO:572), DPVSG (SEQ ID NO:573), IDPV (SEQ ID NO:574), IDPVS (SEQ ID NO:575), IDPVSG (SEQ ID NO:576), HIDPV (SEQ ID NO:577), HIDPVS (SEQ ID NO:578), HIDPVSG (SEQ ID NO:579), FHIDPV (SEQ ID NO:580), FHIDPVS (SEQ ID NO:581), FHIDPVSG (SEQ ID NO:582), KFHIDPV (SEQ ID NO:583), KFHIDPVS (SEQ ID NO:584), KFHIDPVSG (SEQ ID NO:585), DAD, DADT (SEQ ID NO:586), DADTG (SEQ ID NO:587), IDAD (SEQ ID NO:588), IDADT (SEQ ID NO:589), IDADTG (SEQ ID NO:590), SIDAD (SEQ ID NO:591), SIDADT (SEQ. ID NO:592), SIDADTG (SEQ ID NO:593), FSIDAD (SEQ ID NO:594), FSIDADT (SEQ ID NO:595), FSIDADTG (SEQ ID NO:596), QFSIDAD (SEQ ID NO:597), QFSIDADT (SEQ ID NO:598), QFSIDADTG (SEQ ID NO:599), DSV, DSVS (SEQ ID NO:600), DSVSG (SEQ ID NO:601), IDSV (SEQ ID NO:602), IDSVS (SEQ ID NO:603), IDSVSG (SEQ ID NO:604), HIDSV (SEQ ID NO:605), HIDSVS (SEQ ID NO:606), HIDSVSG (SEQ ID NO:607), FHIDSV (SEQ ID NO:608), FHIDSVS (SEQ ID NO:609), FHIDSVSG (SEQ ID NO:610), TFHIDSV (SEQ ID NO:611), TFHIDSVS (SEQ ID NO:612), TFHIDSVSG (SEQ ID NO:613), DSN, DSNS (SEQ ID NO:614), DSNSG (SEQ ID NO:615), IDSN (SEQ ID NO:616), IDSNS (SEQ ID NO:617), IDSNSG (SEQ ID NO:618), NIDSN (SEQ ID NO:619), NIDSNS (SEQ ID NO:620), NIDSNSG (SEQ ID NO:621), FNIDSN (SEQ ID NO:622), FNIDSNS (SEQ ID NO:623), FNIDSNSG (SEQ ID NO:624), AFNIDSN (SEQ ID NO:625), AFNIDSNS (SEQ ID NO:626), AFNIDSNSG (SEQ ID NO:627), DSS, DSSS (SEQ ID NO:628), DSSSG (SEQ ID NO:629), IDSS (SEQ ID NO:630), IDSSS (SEQ ID NO:631), IDSSSG (SEQ ID NO:632), TIDSS (SEQ ID NO:633), TIDSSS (SEQ ID NO:634), TIDSSSG (SEQ ID NO:635), FTIDSS (SEQ ID NO:636), FTIDSSS (SEQ ID NO:637), FTIDSSSG (SEQ ID NO:638), KFTIDSS (SEQ ID NO:639), KFTIDSSS (SEQ ID NO:640), KFTIDSSSG (SEQ ID NO:641), DEK, DEKN (SEQ ID NO:642), DEKNG (SEQ ID NO:643), LDEK (SEQ ID NO:644), LDEKN (SEQ ID NO:645), LDEKNG (SEQ ID NO:646), TLDEK (SEQ ID NO:647), TLDEKN (SEQ ID NO:648), TLDEKNG (SEQ ID NO:649), FTLDEK (SEQ ID NO:650), FTLDEKN (SEQ ID NO:651), FTLDEKNG (SEQ ID NO:652), LFTLDEK (SEQ ID NO:653), LFTLDEKN (SEQ ID NO:654), LFTLDEKNG (SEQ ID NO:655), NEK, NEKT (SEQ ID NO:656), NEKTG (SEQ ID NO:657), INEK (SEQ ID NO:658), INEKT (SEQ ID NO:659), INEKTG (SEQ ID NO:660), LINEK (SEQ ID NO:661), LINEKT (SEQ ID NO:662), LINEKTG (SEQ ID NO:663), FLINEK (SEQ ID NO:664), FLINEKT (SEQ ID NO:665), FLINEKTG (SEQ ID NO:666), KFLINEK (SEQ ID NO:667), KFLINEKT (SEQ ID NO:668) and KFLINEKTG (SEQ ID NO:4052).

100. A modulating agent according to claim 99, wherein the agent comprises a linear peptide having the sequence N-Ac-KFHIDPVSG-NH₂ (SEQ ID NO:585), N-Ac-QFSIDADTG-NH₂ (SEQ ID NO:599), N-Ac-TFHIDSVSG-NH₂ (SEQ ID NO:613), N-Ac-AFNIDSNSG-NH₂ (SEQ ID NO:627), N-Ac-KFTIDSSSG-NH₂ (SEQ ID NO:641), N-Ac-LFTLDEKNG-NH₂ (SEQ ID NO:655) or N-Ac-KFLINEKTG-NH₂ (SEQ ID NO:4052).

101. A modulating agent according to claim 99, wherein a cadherin-related neuronal receptor CAR sequence is present within a cyclic peptide.

102. A modulating agent according to claim 101, wherein the cyclic peptide comprises a sequence selected from the group consisting of CDPVC (SEQ ID NO:3572), CDPVSC (SEQ ID NO:3573), CDPVSGC (SEQ ID NO:3574), CIDPVC (SEQ ID NO:3575), CIDPVSC (SEQ ID NO:3576), CIDPVSGC (SEQ ID NO:3577), CHIDPVC (SEQ ID NO:3578), CHIDPVSC (SEQ ID NO:3579), CHIDPVSGC (SEQ ID NO:3580), CFHIDPVC (SEQ ID NO:3581), CFHIDPVSC (SEQ ID NO:3582), CFHIDPVSGC (SEQ ID NO:3583), CKFHIDPVC (SEQ ID NO:3584), CKFHIDPVSC (SEQ ID NO:3585), CKFHIDPVSGC (SEQ ID NO:3586), CDADC (SEQ ID NO:3587), CDADTC (SEQ ID NO:3588), CDADTGC (SEQ ID NO:3589), CIDADTC (SEQ ID NO:3590), CIDADC (SEQ ID NO:3591), CIDADTGC (SEQ ID NO:3592), CSIDADC (SEQ ID NO:3593), CSIDADTC (SEQ ID NO:3594), CSIDADTGC (SEQ ID NO:3595), CFSIDADC (SEQ ID NO:3596), CFSIDADTC (SEQ ID NO:3597), CFSIDADTGC (SEQ ID NO:3598), CQFSIDADC (SEQ ID NO:3599), CQFSIDADTC (SEQ ID NO:3600), CQFSIDADTGC (SEQ ID NO:3601), CDSVC (SEQ ID NO:3602), CDSVSC (SEQ ID NO:3603), CDSVSGC (SEQ ID NO:3604), CIDSVC (SEQ ID NO:3605), CIDSVSC (SEQ ID NO:3606), CIDSVSGC (SEQ ID NO:3607), CHIDSVC (SEQ ID NO:3608), CHIDSVSC (SEQ ID NO:3609), CHIDSVSGC (SEQ ID NO:3610), CFHIDSVC (SEQ ID NO:3611), CFHIDSVSC (SEQ ID NO:3612), CFHIDSVSGC (SEQ ID NO:3613), CTFHIDSVC (SEQ ID NO:3614), CTFHIDSVSC (SEQ ID NO:3615), CTFHIDSVSGC (SEQ ID NO:3616), CDSNC (SEQ ID NO:3617), CDSNSC (SEQ ID NO:3618), CDSNSGC (SEQ ID NO:3619), CIDSNC (SEQ ID NO:3620), CIDSNSC (SEQ ID NO:3621), CIDSNSGC (SEQ ID NO:3622), CNIDSNC (SEQ ID NO:3623), CNIDSNSC (SEQ ID NO:3624), CNIDSNSGC (SEQ ID NO:3625), CFNIDSNC (SEQ ID NO:3626), CFNIDSNSC (SEQ ID NO:3627), CFNIDSNSGC (SEQ ID NO:3628), CAFNIDSNC (SEQ ID NO:3629), CAFNIDSNSC (SEQ ID NO:3631), CAFNIDSNSGC (SEQ ID NO:3632), CDSSC (SEQ ID NO:3633), CDSSSC (SEQ ID NO:3634), CDSSSGC (SEQ ID NO:3635), CIDSSC (SEQ ID NO:3636), CIDSSSC (SEQ ID NO:3637), CIDSSSGC (SEQ ID NO:3638), CTIDSSC (SEQ ID NO:3639), CTIDSSSC (SEQ ID NO:3640), CTIDSSSGC (SEQ ID NO:3641), CFTIDSSC (SEQ ID NO:3642), CFTIDSSSC (SEQ ID NO:3643), CFTIDSSSGC (SEQ ID NO:3644), CKFTIDSSC (SEQ ID NO:3645), CKFTIDSSSC (SEQ ID NO:3646), CKFTIDSSSGC (SEQ ID NO:3647), CDEKC (SEQ ID NO:3648), CDEKNC (SEQ ID NO:3649), CDEKNGC (SEQ ID NO:3650), CLDEKC (SEQ ID NO:3651), CLDEKNC (SEQ ID NO:3652), CLDEKNGC (SEQ ID NO:3653), CTLDEKC (SEQ ID NO:3654), CTLDEKNC (SEQ ID NO:3655), CTLDEKNGC (SEQ ID NO:3656), CFTLDEKC (SEQ ID NO:3657), CFTLDEKNC (SEQ ID NO:3658), CFTLDEKNGC (SEQ ID NO:3659), CLFTLDEKC (SEQ ID NO:3660), CLFTLDEKNC (SEQ ID NO:3661), CLFTLDEKNGC (SEQ ID NO:3662), CNEKC (SEQ ID NO:3663), CNEKTC (SEQ ID NO:3664), CNEKTGC (SEQ ID NO:3665), CINEKC (SEQ ID NO:3666), CINEKTC (SEQ ID NO:3667), CINEKTGC (SEQ ID NO:3668), CLINEKC (SEQ ID NO:3669), CLINEKTC (SEQ ID NO:3670), CLINEKTGC (SEQ ID NO:3671), CFLINEKC (SEQ ID NO:3672), CFLINEKTC (SEQ ID NO:3673), CFLINEKTGC (SEQ ID NO:3674), CKFLINEKC (SEQ ID NO:3675), CKFLINEKTC (SEQ ID NO:3676), CKFLINEKTGC (SEQ ID NO:3677), EDPVK (SEQ ID NO:3678), EDPVSK (SEQ ID NO:3679), EDPVSGK (SEQ ID NO:3680), EIDPVK (SEQ ID NO:3681), EIDPVSK (SEQ ID NO:3682), EIDPVSGK (SEQ ID NO:3683), EHIDPVK (SEQ ID NO:3684), EHIDPVSK (SEQ ID NO:3685), EHIDPVSGK (SEQ ID NO:3686), EFHIDPVK (SEQ ID NO:3687), EFHIDPVSK (SEQ ID NO:3688), EFHIDPVSGK (SEQ ID NO:3689), EKFHIDPVK (SEQ ID NO:3690), EKFHIDPVSK (SEQ ID NO:3691), EKFHIDPVSGK (SEQ ID NO:3692), EDADK (SEQ ID NO:3693), EDADTK (SEQ ID NO:3694), EDADTGK (SEQ ID NO:3695), EIDADK (SEQ ID NO:3696), EIDADTK (SEQ ID NO:3697), EIDADTGK (SEQ ID NO:3698), ESIDADK (SEQ ID NO:3699), ESIDADTK (SEQ ID NO:3700), ESIDADTGK (SEQ ID NO:3701), EFSIDADK (SEQ ID NO:3702), EFSIDADTK (SEQ ID NO:3703), EFSIDADTGK (SEQ ID NO:3704), EQFSIDADK (SEQ ID NO:3705), EQFSIDADTK (SEQ ID NO:3706), EQFSIDADTGK (SEQ ID NO:3707), EDSVK (SEQ ID NO:3708), EDSVSK (SEQ ID NO:3709), EDSVSGK (SEQ ID NO:3710), EIDSVK (SEQ ID NO:3711), EIDSVSK (SEQ ID NO:3712), EIDSVSGK (SEQ ID NO:3713), EHIDSVK (SEQ ID NO:3714), EHIDSVSK (SEQ ID NO:3715), EHIDSVSGK (SEQ ID NO:3716), EFHIDSVK (SEQ ID NO:3717), EFHIDSVSK (SEQ ID NO:3718), EFHIDSVSGK (SEQ ID NO:3719), ETFHIDSVK (SEQ ID NO:3720), ETFHIDSVSK (SEQ ID NO:3721), ETFHIDSVSGK (SEQ ID NO:3722), EDSNK (SEQ ID NO:3723), EDSNSK (SEQ ID NO:3724), EDSNSGK (SEQ ID NO:3725), EIDSNK (SEQ ID NO:3726), EIDSNSK (SEQ ID NO:3727), EIDSNSGK (SEQ ID NO:3728), ENIDSNK (SEQ ID NO:3729), ENIDSNSK (SEQ ID NO:3730), ENIDSNSGK (SEQ ID NO:3731), EFNIDSNK (SEQ ID NO:3732), EFNIDSNSK (SEQ ID NO:3733), EFNIDSNSGK (SEQ ID NO:3734), EAFNIDSNK (SEQ ID NO:3735), EAFNIDSNSK (SEQ ID NO:3737), EAFNIDSNSGK (SEQ ID NO:3738), EDSSK (SEQ ID NO:3739), EDSSSK (SEQ ID NO:3740), EDSSSGK (SEQ ID NO:3741), EIDSSK (SEQ ID NO:3742), EIDSSSK (SEQ ID NO:3743), EIDSSSGK (SEQ ID NO:3744), ETIDSSK (SEQ ID NO:3745), ETIDSSSK (SEQ ID NO:3746), ETIDSSSGK (SEQ ID NO:3747), EFTIDSSK (SEQ ID NO:3748), EFTIDSSSK (SEQ ID NO:3749), EFTIDSSSGK (SEQ ID NO:3750), EKFTIDSSK (SEQ ID NO:3751), EKFTIDSSSK (SEQ ID NO:3752), EKFTIDSSSGK (SEQ ID NO:3753), EDEKK (SEQ ID NO:3754), EDEKNK (SEQ ID NO:3755), EDEKNGK (SEQ ID NO:3756), ELDEKK (SEQ ID NO:3757), ELDEKNK (SEQ ID NO:3758), ELDEKNGK (SEQ ID NO:3759), ETLDEKK (SEQ ID NO:3760), ETLDEKNK (SEQ ID NO:3761), ETLDEKNGK (SEQ ID NO:3762), EFTLDEKK (SEQ ID NO:3763), EFTLDEKNK (SEQ ID NO:3764), EFTLDEKNGK (SEQ ID NO:3765), ELFTLDEKK (SEQ ID NO:3766), ELFTLDEKNK (SEQ ID NO:3767), ELFTLDEKNGK (SEQ ID NO:3768), ENEKK (SEQ ID NO:3769), ENEKTK (SEQ ID NO:3770), ENEKTGK (SEQ ID NO:3771), EINEKK (SEQ ID NO:3772), EINEKTK (SEQ ID NO:3773), EINEKTGK (SEQ ID NO:3774), ELINEKK (SEQ ID NO:3775), ELINEKTK (SEQ ID NO:3776), ELINEKTGK (SEQ ID NO:3777), EFLINEKK (SEQ ID NO:3778), EFLINEKTK (SEQ ID NO:3779), EFLINEKTGK (SEQ ID NO:3780), EKFLINEKK (SEQ ID NO:3781), EKFLINEKTK (SEQ ID NO:3782), EKFLINEKTGK (SEQ ID NO:3783), KDPVD (SEQ ID NO:3784), KDPVSD (SEQ ID NO:3785), KDPVSGD (SEQ ID NO:3786), KIDPVD (SEQ ID NO:3787), KIDPVSD (SEQ ID NO:3788), KIDPVSGD (SEQ ID NO:3789), KHIDPVD (SEQ ID NO:3790), KHIDPVSD (SEQ ID NO:3791), KHIDPVSGD (SEQ ID NO:3792), KFHIDPVD (SEQ ID NO:3793), KFHIDPVSD (SEQ ID NO:3794), KFHIDPVSGD (SEQ ID NO:3795), KKFHIDPVD (SEQ ID NO:3796), KKFHIDPVSD (SEQ ID NO:3797), KKFHIDPVSGD (SEQ ID NO:3798), KDADD (SEQ ID NO:3799), KDADTD (SEQ ID NO:3800), KDADTGD (SEQ ID NO:3801), KIDADD (SEQ ID NO:3802), KIDADTD (SEQ ID NO:3803), KIDADTGD (SEQ ID NO:3804), KSIDADD (SEQ ID NO:3805), KSIDADTD (SEQ ID NO:3806), KSIDADTGD (SEQ ID NO:3807), KFSIDADD (SEQ ID NO:3808), KFSIDADTD (SEQ ID NO:3809), KFSIDADTGD (SEQ ID NO:3810), KOFSIDADD (SEQ ID NO:3811), KQFSIDADTD (SEQ ID NO:3812), KOFSIDADTGD (SEQ ID NO:3813), KDSVD (SEQ ID NO:3814), KDSVSD (SEQ ID NO:3815), KDSVSGD (SEQ ID NO:3816), KIDSVD (SEQ ID NO:3817), KIDSVSD (SEQ ID NO:3818), KIDSVSGD (SEQ ID NO:3819), KHIDSVD (SEQ ID NO:3820), KHIDSVSD (SEQ ID NO:3821), KHIDSVSGD (SEQ ID NO:3822), KFHIDSVD (SEQ ID NO:3823), KFHIDSVSD (SEQ ID NO:3824), KFHIDSVSGD (SEQ ID NO:3825), KTFHIDSVD (SEQ ID NO:3826), KTFHIDSVSD (SEQ ID NO:3827), KTFHIDSVSGD (SEQ ID NO:3828), KDSND (SEQ ID NO:3829), KDSNSD (SEQ ID NO:3830), KDSNSGD (SEQ ID NO:3831), KIDSND (SEQ ID NO:3832), KIDSNSD (SEQ ID NO:3833), KIDSNSGD (SEQ ID NO:3834), KNIDSND (SEQ ID NO:3835), KNIDSNSD (SEQ ID NO:3836), KNIDSNSGD (SEQ ID NO:3837), KFNIDSND (SEQ ID NO:3838), KFNIDSNSD (SEQ ID NO:3839), KFNIDSNSGD (SEQ ID NO:3840), KAFNIDSND (SEQ ID NO:3841), KAFNIDSNSD (SEQ ID NO:3843), KAFNIDSNSGD (SEQ ID NO:3844), KDSSD (SEQ ID NO:3845), KDSSSD (SEQ ID NO:3846), KDSSSGD (SEQ ID NO:3847), KIDSSD (SEQ ID NO:3848), KIDSSSD (SEQ ID NO:3849), KIDSSSGD (SEQ ID NO:3850), KTIDSSD (SEQ ID NO:3851), KTIDSSSD (SEQ ID NO:3852), KTIDSSSGD (SEQ ID NO:3853), KFTIDSSD (SEQ ID NO:3854), KFTIDSSSD (SEQ ID NO:3855), KFTIDSSSGD (SEQ ID NO:3856), KKFTIDSSD (SEQ ID NO:3857), KKFTIDSSSD (SEQ ID NO:3858), KKFTIDSSSGD (SEQ ID NO:3859), KDEKD (SEQ ID NO:3860), KDEKND (SEQ ID NO:3861), KDEKNGD (SEQ ID NO:3862), KLDEKD (SEQ ID NO:3863), KLDEKND (SEQ ID. NO:3864), KLDEKNGD (SEQ ID NO:3865), KTLDEKD (SEQ ID NO:3866), KTLDEKND (SEQ ID NO:3867), KTLDEKNGD (SEQ ID NO:3868), KFTLDEKD (SEQ ID NO:3869), KFTLDEKND (SEQ ID NO:3870), KFTLDEKNGD (SEQ ID NO:3871), KLFTLDEKD (SEQ ID NO:3872), KLFTLDEKND (SEQ ID NO:3873), KLFTLDEKNGD (SEQ ID NO:3874), KNEKD (SEQ ID NO:3875), KNEKTD (SEQ ID NO:3876), KNEKTGD (SEQ ID NO:3877), KINEKD (SEQ ID NO:3878), KINEKTD (SEQ ID NO:3879), KINEKTGD (SEQ ID NO:3880), KLINEKD (SEQ ID NO:3881), KLINEKTD (SEQ ID NO:3882), KLINEKTGD (SEQ ID NO:3883), KFLINEKD (SEQ ID NO:3884), KFLINEKTD (SEQ ID NO:3885), KFLINEKTGD (SEQ ID NO:3886), KKFLINEKD (SEQ ID NO:3887), KKFLINEKTD (SEQ ID NO:3888) and KKFLINEKTGD (SEQ ID NO:3889).

103. A polynucleotide encoding a modulating agent according to claim 99.

104. A modulating agent comprising an antibody or antigen-binding fragment thereof that:
(a) specifically binds to a cadherin-related neuronal receptor CAR sequence selected from the group consisting of KFHIDPVSG (SEQ ID NO:585), QFSIDADTG (SEQ ID NO:599), TFHIDSVSG (SEQ ID NO:613), AFNIDSNSG (SEQ ID NO:627), KFTIDSSSG (SEQ ID NO:641), LFTLDEKNG (SEQ ID NO:655) and KFLINEKTG (SEQ ID NO:4052); and
(b) modulates a cadherin-related neuronal receptor-mediated function.

105. A modulating agent according to any one of claims 1-4 or 12-14 linked to a drug.

106. A modulating agent according to any one of claims 1-4 or 12-14 linked to a detectable marker.

107. A modulating agent according to any one of claims 1-4 or 12-14 linked to a targeting agent.

108. A modulating agent according to any one of claims 1-4 or 12-14 linked to a support material.

109. A modulating agent according to claim 108, wherein the support material is a polymeric matrix.

110. A modulating agent according to claim 108, wherein the support material is selected from the group consisting of plastic dishes, plastic tubes, sutures, membranes, ultra thin films, bioreactors and microparticles.

111. A modulating agent according to any one of claims 14 or 12-14, further comprising one or more of:
(a) a CAR sequence that is specifically recognized by an adhesion molecule other than the nonclassical cadherin; and/or
(b) an antibody or antigen-binding fragment thereof that specifically binds to a CAR sequence that is specifically recognized by an adhesion molecule other than the nonclassical cadherin.

112. A modulating agent according to claim 111, wherein the adhesion molecule is selected from the group consisting of cadherins, integrins, occludin, claudins, desmogleins, desmocollins, protocadherins, cadherin-related neuronal receptors, fibronectin, laminin, claudins and other extracellular matrix proteins.

113. A pharmaceutical composition comprising a modulating agent according to any one of claims 1-4 or 12-14 in combination with a pharmaceutically acceptable carrier.

114. A composition according to claim 113, further comprising a drug.

115. A composition according to claim 113, wherein the modulating agent is present within a sustained-release formulation.

116. A pharmaceutical composition according to claim 115, further comprising a modulator of cell adhesion that comprises one or more of:
(a) a CAR sequence that is specifically recognized by an adhesion molecule other than the nonclassical cadherin; and/or
(b) an antibody or antigen-binding fragment thereof that specifically binds to a CAR sequence that is specifically recognized by an adhesion molecule other than the nonclassical cadherin.

117. A pharmaceutical composition according to claim 116, wherein the adhesion molecule is selected from the group consisting of cadherins, integrins, occludin, claudins, desmogleins, desmocollins, protocadherins, cadherin-related neuronal receptors, fibronectin, laminin and other extracellular matrix proteins.

118. A modulating agent according to claim 1, wherein the agent comprises one or more desmoglein-1 CAR sequences selected from the group consisting: RAL, RALN (SEQ ID NO: 4053), RALNS (SEQ ID NO: 4054, RALNSM (SEQ ID NO: 4055), RALNSL (SEQ ID NO: 4056), RALNSMG (SEQ ID NO: 4057), RALNSLG (SEQ ID NO: 4058), CRAL (SEQ ID NO: 4059), CRALN (SEQ ID NO: 4060), CRALNS (SEQ ID NO: 4061), CRALNSM (SEQ ID NO:160 4062), CRALNSL (SEQ ID NO:161 4063), CRALNSMG (SEQ ID NO: 4064), CRALNSLG (SEQ ID NO: 4065), YCRAL (SEQ ID NO: 4066), YCRALN (SEQ ID NO: 4067), YCRALNS (SEQ ID NO: 4068), YCRALNSM (SEQ ID NO: 4069), YCRALNSL (SEQ ID NO: 4070), YCRALNSMG (SEQ ID NO: 4071), YCRALNSLG (SEQ ID NO: 4072), IYRAL (SEQ ID NO: 4073), IYRALN (SEQ ID NO: 4074), IYRALNS (SEQ ID NO: 4075), IYRALNSM (SEQ ID NO: 4076), IYRALNSL (SEQ ID NO: 4077), IYRALNSMG (SEQ ID NO: 4078) or IYRALNSLG (SEQ ID NO: 4079); or (b) an analogue of any of the foregoing sequences that differs in one or more substitutions, deletions, additions and/or insertions such that that ability of the analogue to modulate a desmoglein-mediated function is not substantially diminished.

119. A modulating agent according to claim 118, wherein the agent comprises a linear peptide having the sequence N-Ac-IYRALNSMG-NH2 (SEQ ID NO: 4080) or N-Ac-IYRALNSLG-NH2 (SEQ ID NO: 4081).

120. A modulating agent according to claim 118, wherein a desmoglein-1 CAR sequence is present within a cyclic peptide.

121. A modulating agent according to claim 120, wherein the cyclic peptide comprises a sequence selected from the group consisting of CRALC (SEQ ID NO: 4236), CRALNC (SEQ ID NO: 4237), CRALNSC (SEQ ID NO: 4238), CRALNSMC (SEQ ID NO: 4239), CRALNSLC (SEQ ID NO: 4240), CRALNSMGC (SEQ ID NO: 4241), CRALNSLGC (SEQ ID NO: 4242), CCRALC (SEQ ID NO: 4243), CCRALNC (SEQ ID NO: 4244), CCRALNSC (SEQ ID NO: 4245), CCRALNSMC (SEQ ID NO: 4246), CCRALNSLC (SEQ ID NO: 4247), CCRALNSMGC (SEQ ID NO: 4248), CCRALNSLGC (SEQ ID NO: 4249), CYCRALC (SEQ ID NO: 4250), CYCRALNC (SEQ ID NO: 4251), CYCRALNSC (SEQ ID NO: 4252), CYCRALNSMC (SEQ ID NO: 4253), CYCRALNSLC (SEQ ID NO: 4254), CYCRALNSMGC (SEQ ID NO: 4255), CYCRALNSLGC (SEQ ID NO: 4256), CIYRALC (SEQ ID NO: 4257), CIYRALNC (SEQ ID NO: 4258), CIYRALNSC (SEQ ID NO: 4259), CIYRALNSMC (SEQ ID NO: 4260), CIYRALNSLC (SEQ ID NO: 4261), CIYRALNSMGC (SEQ ID NO: 4262), CIYRALNSLGC (SEQ ID NO: 4263), ERALK (SEQ ID NO: 4264), ERALNK (SEQ ID NO: 4265), ERALNSK (SEQ ID NO: 4266), ERALNSMK (SEQ ID NO: 4267), ERALNSLK (SEQ ID NO: 4268), ERALNSMGK (SEQ ID NO: 4269), ERALNSLGK (SEQ ID NO: 4270), ECRALK (SEQ ID NO: 4271), ECRALNK (SEQ ID NO: 4272), ECRALNSK (SEQ ID NO: 4273), ECRALNSMK (SEQ ID NO: 4274), ECRALNSLK (SEQ ID NO: 4275), ECRALNSMGK (SEQ ID NO: 4276), ECRALNSLGK (SEQ ID NO: 4277), EYCRALK (SEQ ID NO: 4278), EYCRALNK (SEQ ID NO: 4279), EYCRALNSK (SEQ ID NO: 4280), EYCRALNSMK (SEQ ID NO: 4281), EYCRALNSLK (SEQ ID NO: 4282), EYCRALNSMGK (SEQ ID NO: 4283), EYCRALNSLGK (SEQ ID NO: 4284), EIYRALK (SEQ ID NO: 4285), EIYRALNK (SEQ ID NO: 4286), EIYRALNSK (SEQ ID NO: 4287), EIYRALNSMK (SEQ ID NO: 4288), EIYRALNSLK (SEQ ID NO: 4289), EIYRALNSMGK (SEQ ID NO: 4290), EIYRALNSLGK (SEQ ID NO: 4291), KRALE (SEQ ID NO: 4292), KRALNE (SEQ ID NO: 4293), KRALNSE (SEQ ID NO: 4294), KRALNSME (SEQ ID NO: 4295), KRALNSLE (SEQ ID NO: 4296), KRALNSMGE (SEQ ID NO: 4297), KRALNSLGE (SEQ ID NO: 4298), KCRALE (SEQ ID NO: 4299), KCRALNE (SEQ ID NO: 4300), KCRALNSE (SEQ ID NO: 4301), KCRALNSME (SEQ ID NO: 4302), KCRALNSLE (SEQ ID NO: 4303), KCRALNSMGE (SEQ ID NO: 4304), KCRALNSLGE (SEQ ID NO: 4305), KYCRALE (SEQ ID NO: 4306), KYCRALNE (SEQ ID NO: 4307), KYCRALNSE (SEQ ID NO: 4308), KYCRALNSME (SEQ ID NO: 4309), KYCRALNSLE (SEQ ID NO: 4310), KYCRALNSMGE (SEQ ID NO: 4311), KYCRALNSLGE (SEQ ID NO: 4312), KIYRALE (SEQ ID NO: 4313), KIYRALNE (SEQ ID NO: 4314), KIYRALNSE (SEQ ID NO: 4315), KIYRALNSME (SEQ ID NO: 4316), KIYRALNSLE (SEQ ID NO: 4317), KIYRALNSMGE (SEQ ID NO: 4318), KIYRALNSLGE (SEQ ID NO: 4319), DRALK (SEQ ID NO: 4320), DRALNK (SEQ ID NO: 4321), DRALNSK (SEQ ID NO: 4322), DRALNSMK (SEQ ID NO: 4323), DRALNSLK (SEQ ID NO: 4324), DRALNSMGK (SEQ ID NO: 4325), DRALNSLGK (SEQ ID NO: 4326), DCRALK (SEQ ID NO: 4327), DCRALNK (SEQ ID NO: 4328), DCRALNSK (SEQ ID NO: 4329), DCRALNSMK (SEQ ID NO: 4330), DCRALNSLK (SEQ ID NO: 4331), DCRALNSMGK (SEQ ID NO: 4332), DCRALNSLGK (SEQ ID NO: 4333), DYCRALK (SEQ ID NO: 4334), DYCRALNK (SEQ ID NO: 4335), DYCRALNSK (SEQ ID NO: 4336), DYCRALNSMK (SEQ ID NO: 4337), DYCRALNSLK (SEQ ID NO: 4338), DYCRALNSMGK (SEQ ID NO: 4339), DYCRALNSLGK (SEQ ID NO: 4340), DIYRALK (SEQ ID NO: 4341), DIYRALNK (SEQ ID NO: 4342), DIYRALNSK (SEQ ID NO: 4343), DIYRALNSMK (SEQ ID NO: 4344), DIYRALNSLK (SEQ ID NO: 4345), DIYRALNSMGK (SEQ ID NO: 4346), DIYRALNSLGK (SEQ ID NO: 4347), KRALD (SEQ ID NO: 4348), KRALND (SEQ ID NO: 4349), KRALNSD (SEQ ID NO: 4350), KRALNSMD (SEQ ID NO: 4351), KRALNSLD (SEQ ID NO: 4352), KRALNSMGD (SEQ ID NO: 4353), KRALNSLGD (SEQ ID NO: 4354), KCRALD (SEQ ID NO: 4355), KCRALND (SEQ ID NO: 4356), KCRALNSD (SEQ ID NO: 4357), KCRALNSMD (SEQ ID NO: 4358), KCRALNSLD (SEQ ID NO: 4359), KCRALNSMGD (SEQ ID NO: 4360), KCRALNSLGD (SEQ ID NO: 4361), KYCRALD (SEQ ID NO: 4362), KYCRALND (SEQ ID NO: 4363), KYCRALNSD (SEQ ID NO: 4364), KYCRALNSMD (SEQ ID NO: 4365), KYCRALNSLD (SEQ ID NO: 4366), KYCRALNSMGD (SEQ ID NO: 4367), KYCRALNSLGD (SEQ ID NO: 4368), KIYRALD (SEQ ID NO: 4369), KIYRALND (SEQ ID NO: 4370), KIYRALNSD (SEQ ID NO: 4371), KIYRALNSMD (SEQ ID NO: 4372), KIYRALNSLD (SEQ ID NO: 4373), KIYRALNSMGD (SEQ ID NO: 4374), KIYRALNSLGD (SEQ ID NO: 4375), RALNS (SEQ ID NO: 4376), RALNSM (SEQ ID NO: 4377), RALNSL (SEQ ID NO: 4378), RALNSMG (SEQ ID NO: 4379), RALNSLG (SEQ ID NO: 4380), CRALN (SEQ ID NO: 4381), CRALNS (SEQ ID NO: 4382), CRALNSM (SEQ ID NO: 4383), CRALNSL (SEQ ID NO: 4384), CRALNSMG (SEQ ID NO: 4385), CRALNSLG (SEQ ID NO: 4386), YCRAL (SEQ ID NO: 4387), YCRALN (SEQ ID NO: 4388), YCRALNS (SEQ ID NO: 4389), YCRALNSM (SEQ ID NO: 4390), YCRALNSL (SEQ ID NO: 4391), YCRALNSMG (SEQ ID NO: 4392), YCRALNSLG (SEQ ID NO: 4393), IYRAL (SEQ ID NO: 4394), IYRALN (SEQ ID NO: 4395), IYRALNS (SEQ ID NO: 4396), IYRALNSM (SEQ ID NO: 4397), IYRALNSL (SEQ ID NO: 4398), IYRALNSMG (SEQ ID NO: 4399) and IYRALNSLG (SEQ ID NO: 4400).

122. A polynucleotide encoding a modulating agent according to claim 118.

123. A modulating agent comprising an antibody or antigen-binding fragment thereof that:
(a) specifically binds to a desmoglein-1 CAR sequence according to claim 118; and
(b) modulates a desmoglein-mediated function.

124. A modulating agent according to claim 1, wherein the agent comprises one or more desmoglein-2 CAR sequences selected from the group consisting: of YAL, YALD (SEQ ID NO: 4082), YALDA (SEQ ID NO: 4083), YALDAR (SEQ ID NO: 4084), YALDARG (SEQ ID NO: 4085), GYAL (SEQ ID NO: 4086), GYALD (SEQ ID NO: 4087), GYALDA (SEQ ID NO: 4088), GYALDAR (SEQ ID NO: 4089), GYALDARG (SEQ ID NO: 4090), TGYAL (SEQ ID NO: 4091), TGYALD (SEQ ID NO: 4092), TGYALDA (SEQ ID NO: 4093), TGYALDAR (SEQ ID NO: 4094), TGYALDARG (SEQ ID NO: 4095), LTGYAL (SEQ ID NO: 4096), LTGYALD (SEQ ID NO: 4097), LTGYALDA (SEQ ID NO: 4098), LTGYALDAR (SEQ ID NO: 4099) or LTGYALDARG (SEQ ID NO: 4100); or (b) an analogue of any of the foregoing sequences that differs in one or more substitutions, deletions, additions and/or insertions such that that ability of the analogue to modulate a desmoglein-mediated function is not substantially diminished.

125. A modulating agent according to claim 124, wherein the agent comprises a linear peptide having the sequence N-Ac-LTGYALDARG-NH2 (SEQ ID NO: 4101).

126. A modulating agent according to claim 124, wherein a desmoglein-2 CAR sequence is present within a cyclic peptide.

127. A modulating agent according to claim 126, wherein the cyclic peptide comprises a sequence selected from the group consisting of CYALC (SEQ ID NO: 4401), CYALDC (SEQ ID NO: 4402), CYALDAC (SEQ ID NO: 4403), CYALDARC (SEQ ID NO: 4404), CYALDARGC (SEQ ID NO: 4405), CGYALC (SEQ ID NO: 4406), CGYALDC (SEQ ID NO: 4407), CGYALDAC (SEQ ID NO: 4408), CGYALDARC (SEQ ID NO: 4409), CGYALDARGC (SEQ ID NO: 4410), CTGYALC (SEQ ID NO: 4411), CTGYALDC (SEQ ID NO: 4412), CTGYALDAC (SEQ ID NO: 4413), CTGYALDARC (SEQ ID NO: 4414), CTGYALDARGC (SEQ ID NO: 4415), CLTGYALC (SEQ ID NO: 4416), CLTGYALDC (SEQ ID NO: 4417), CLTGYALDAC (SEQ ID NO: 4418), CLTGYALDARC (SEQ ID NO: 4419), CLTGYALDARGC (SEQ ID NO: 4420), EYALK (SEQ ID NO: 4421), EYALDK (SEQ ID NO: 4422), EYALDAK (SEQ ID NO: 4423), EYALDARK (SEQ ID NO: 4424), EYALDARGK (SEQ ID NO: 4425), EGYALK (SEQ ID NO: 4426), EGYALDK (SEQ ID NO: 4427), EGYALDAK (SEQ ID NO: 4428), EGYALDARK (SEQ ID NO: 4429), EGYALDARGK (SEQ ID NO: 4430), ETGYALK (SEQ ID NO: 4431), ETGYALDK (SEQ ID NO: 4432), ETGYALDAK (SEQ ID NO: 4433), ETGYALDARK (SEQ ID NO: 4434), ETGYALDARGK (SEQ ID NO: 4435), ELTGYALK (SEQ ID NO: 4436), ELTGYALDK (SEQ ID NO: 4437), ELTGYALDAK (SEQ ID NO: 4438), ELTGYALDARK (SEQ ID NO: 4439), ELTGYALDARGK (SEQ ID NO: 4440), KYALE (SEQ ID NO: 4441), KYALDE (SEQ ID NO: 4442), KYALDAE (SEQ ID NO: 4443), KYALDARE (SEQ ID NO: 4444), KYALDARGE (SEQ ID NO: 4445), KGYALE (SEQ ID NO: 4446), KGYALDE (SEQ ID NO: 4447), KGYALDAE (SEQ ID NO: 4448), KGYALDARE (SEQ ID NO: 4449), KGYALDARGE (SEQ ID NO: 4450), KTGYALE (SEQ ID NO: 4451), KTGYALDE (SEQ ID NO: 4452), KTGYALDAE (SEQ ID NO: 4453), KTGYALDARE (SEQ ID NO: 4454), KTGYALDARGE (SEQ ID NO: 4455), KLTGYALE (SEQ ID NO: 4456), KLTGYALDE (SEQ ID NO: 4457), KLTGYALDAE (SEQ ID NO: 4458), KLTGYALDARE (SEQ ID NO: 4459), KLTGYALDARGE (SEQ ID NO: 4460), DYALK (SEQ ID NO: 4461), DYALDK (SEQ ID NO: 4462), DYALDAK (SEQ ID NO: 4463), DYALDARK (SEQ ID NO: 4464), DYALDARGK (SEQ ID NO: 4465), DGYALK (SEQ ID NO: 4466), DGYALDK (SEQ ID NO: 4467), DGYALDAK (SEQ ID NO: 4468), DGYALDARK (SEQ ID NO: 4469), DGYALDARGK (SEQ ID NO: 4470), DTGYALK (SEQ ID NO: 4471), DTGYALDK (SEQ ID NO: 4472), DTGYALDAK (SEQ ID NO: 4473), DTGYALDARK (SEQ ID NO: 4474), DTGYALDARGK (SEQ ID NO: 4475), DLTGYALK (SEQ ID NO: 4476), DLTGYALDK (SEQ ID NO: 4474), DLTGYALDAK (SEQ ID NO: 4478), DLTGYALDARK (SEQ ID NO: 4479), DLTGYALDARGK (SEQ ID NO: 4480), KYALD (SEQ ID NO: 4481), KYALDD (SEQ ID NO: 4482), KYALDAD (SEQ ID NO: 4483), KYALDARD (SEQ ID NO: 4484), KYALDARGD (SEQ ID NO: 4485), KGYALD (SEQ ID NO: 4486), KGYALDD (SEQ ID NO: 4487), KGYALDAD (SEQ ID NO: 4488), KGYALDARD (SEQ ID NO: 4489), KGYALDARGD (SEQ ID NO: 4490), KTGYALD (SEQ ID NO: 4491), KTGYALDD (SEQ ID NO: 4492), KTGYALDAD (SEQ ID NO: 4493), KTGYALDARD (SEQ ID NO: 4494), KTGYALDARGD (SEQ ID NO: 4495), KLTGYALD (SEQ ID NO: 4496), KLTGYALDD (SEQ ID NO: 4497), KLTGYALDAD (SEQ ID NO: 4498), KLTGYALDARD (SEQ ID NO: 4499), KLTGYALDARGD (SEQ ID NO: 4500), YALDA (SEQ ID NO: 4501), YALDAR (SEQ ID NO: 4502), YALDARG (SEQ ID NO: 4503), GYALD (SEQ ID NO: 4504), GYALDA (SEQ ID NO: 4505), GYALDAR (SEQ ID NO: 4506), GYALDARG (SEQ ID NO: 4507), TGYAL (SEQ ID NO: 4508), TGYALD (SEQ ID NO: 4509), TGYALDA (SEQ ID NO: 4510), TGYALDAR (SEQ ID NO: 4511), TGYALDARG (SEQ ID NO: 4512), LTGYAL (SEQ ID NO: 4513), LTGYALD (SEQ ID NO: 4514), LTGYALDA (SEQ ID NO: 4515), LTGYALDAR (SEQ ID NO: 4516) and LTGYALDARG (SEQ ID NO: 4517).

128. A polynucleotide encoding a modulating agent according to claim 124.

129. A modulating agent comprising an antibody or antigen-binding fragment thereof that:
(a) specifically binds to a desmoglein-2 CAR sequence according to claim 124; and
(b) modulates a desmoglein-mediated function.

130. A modulating agent according to claim 1, wherein the agent comprises one or more desmoglein-3 CAR sequences selected from the group consisting: of RAL, RALN (SEQ ID NO: 4053), RALNA (SEQ ID NO:200 4102), RALNAQ (SEQ ID NO: 4103), RALNAL (SEQ ID NO: 4104), RALNAQG (SEQ ID NO: 4105), RALNALG (SEQ ID NO: 4106), CRAL (SEQ ID NO: 4107), CRALN (SEQ ID NO: 4108), CRALNA (SEQ ID NO: 4109), CRALNAQ (SEQ ID NO: 4110), CRALNAL (SEQ ID NO: 4111), CRALNAQG (SEQ ID NO: 4112), CRALNALG (SEQ ID NO: 4113), TCRAL (SEQ ID NO: 4114), TCRALN (SEQ ID NO: 4.115), TCRALNA (SEQ ID NO: 4116), TCRALNAQ (SEQ ID NO: 4117), TCRALNAL (SEQ ID NO: 4118), TCRALNAQG (SEQ ID NO: 4119), TCRALNALG (SEQ ID NO: 4120), ITCRAL (SEQ ID NO: 4121), ITCRALN (SEQ ID NO: 4122), ITCRALNA (SEQ ID NO: 4123), ITCRALNAQ (SEQ ID NO: 4124), ITCRALNAL (SEQ ID NO: 4125), ITCRALNAQG (SEQ ID NO: 4126), ITCRALNALG (SEQ ID NO: 4127); or (b) an analogue of any of the foregoing sequences that differs in one or more substitutions, deletions, additions and/or insertions such that that ability of the analogue to modulate a desmoglein-mediated function is not substantially diminished.

131. A modulating agent according to claim 130, wherein the agent comprises a linear peptide having the sequence N-Ac-ITCRALNAQG-NH2 (SEQ ID NO: 4128) and N-Ac-ITCRALNALG-NH2 (SEQ ID NO: 4129).

132. A modulating agent according to claim 130, wherein a desmoglein-3 CAR sequence is present within a cyclic peptide.

133. A modulating agent according to claim 132, wherein the cyclic peptide comprises a sequence selected from the group consisting of CRALC (SEQ ID NO: 4518), CRALNC (SEQ ID NO: 4519), CRALNAC (SEQ ID NO: 4520), CRALNAQC (SEQ ID NO: 4521), CRALNALC (SEQ ID NO: 4522), CRALNAQGC (SEQ ID NO: 4523), CRALNALGC (SEQ ID NO: 4524), CCRALC (SEQ ID NO: 4525), CCRALNC (SEQ ID NO: 4526), CCRALNAC (SEQ ID NO: 4527), CCRALNAQC (SEQ ID NO: 4528), CCRALNALC (SEQ ID NO: 4529), CCRALNAQGC (SEQ ID NO: 4530), CCRALNALGC (SEQ ID NO: 4531), CTCRALC (SEQ ID NO: 4532), CTCRALNC (SEQ ID NO: 4533), CTCRALNAC (SEQ ID NO: 4534), CTCRALNAQC (SEQ ID NO: 4535), CTCRALNALC (SEQ ID NO: 4536), CTCRALNAQGC (SEQ ID NO: 4537), CTCRALNALGC (SEQ ID NO: 4538), CITCRALC (SEQ ID NO: 4539), CITCRALNC (SEQ ID NO: 4540), CITCRALNAC (SEQ ID NO: 4541), CITCRALNAQC (SEQ ID NO: 4542), CITCRALNALC (SEQ ID NO: 4543), CITCRALNAQGC (SEQ ID NO: 4544), CITCRALNALGC (SEQ ID NO: 4545), ERALK (SEQ ID NO: 4546), ERALNK (SEQ ID NO: 4547), ERALNAK (SEQ ID NO: 4548), ERALNAQK (SEQ ID NO: 4549), ERALNALK (SEQ ID NO: 4550), ERALNAQGK (SEQ ID NO: 4551), ERALNALGK (SEQ ID NO: 4552), ECRALK (SEQ ID NO: 4553), ECRALNK (SEQ ID NO: 4554), ECRALNAK (SEQ ID NO: 4555), ECRALNAQK (SEQ ID NO: 4556), ECRALNALK (SEQ ID NO: 4557), ECRALNAQGK (SEQ ID NO: 4558), ECRALNALGK (SEQ ID NO: 4559), ETCRALK (SEQ ID NO: 4560), ETCRALNK (SEQ ID NO: 4561), ETCRALNAK (SEQ ID NO: 4562), ETCRALNAQK (SEQ ID NO: 4563), ETCRALNALK (SEQ ID NO: 4564), ETCRALNAQGK (SEQ ID NO: 4565), ETCRALNALGK (SEQ ID NO: 4566), EITCRALK (SEQ ID NO: 4567), EITCRALNK (SEQ ID NO: 4568), EITCRALNAK (SEQ ID NO: 4569), EITCRALNAQK (SEQ ID NO: 4570), EITCRALNALK (SEQ ID NO: 4571), EITCRALNAQGK (SEQ ID NO: 4572), EITCRALNALGK (SEQ ID NO: 4573), KRALE (SEQ ID NO: 4574), KRALNE (SEQ ID NO: 4575), KRALNAE (SEQ ID NO: 4576), KRALNAQE (SEQ ID NO: 4577), KRALNALE (SEQ ID NO: 4578), KRALNAQGE (SEQ ID NO: 4579), KRALNALGE (SEQ ID NO: 4580), KCRALE (SEQ ID NO: 4581), KCRALNE (SEQ ID NO: 4582), KCRALNAE (SEQ ID NO: 4583), KCRALNAQE (SEQ ID NO: 4584), KCRALNALE (SEQ ID NO: 4585), KCRALNAQGE (SEQ ID NO: 4586), KCRALNALGE (SEQ ID NO: 4587), KTCRALE (SEQ ID NO: 4588), KTCRALNE (SEQ ID NO: 4589), KTCRALNAE (SEQ ID NO: 4590), KTCRALNAQE (SEQ ID NO: 4591), KTCRALNALE (SEQ ID NO: 4592), KTCRALNAQGE (SEQ ID NO: 4593), KTCRALNALGE (SEQ ID NO: 4594), KITCRALE (SEQ ID NO: 4595), KITCRALNE (SEQ ID NO: 4596), KITCRALNAE (SEQ ID NO: 4597), KITCRALNAQE (SEQ ID NO: 4598), KITCRALNALE (SEQ ID NO: 4599), KITCRALNAQGE (SEQ ID NO: 4600), KITCRALNALGE (SEQ ID NO: 4601), DRALK (SEQ ID NO: 4602), DRALNK (SEQ ID NO: 4603), DRALNAK (SEQ ID NO: 4604), DRALNAQK (SEQ ID NO: 4605), DRALNALK (SEQ ID NO: 4606), DRALNAQGK (SEQ ID NO: 4607), DRALNALGK (SEQ ID NO: 4608), DCRALK (SEQ ID NO: 4609), DCRALNK (SEQ ID NO: 4610), DCRALNAK (SEQ ID NO: 4611), DCRALNAQK (SEQ ID NO: 4612), DCRALNALK (SEQ ID NO: 4613), DCRALNAQGK (SEQ ID NO: 4614), DCRALNALGK (SEQ ID NO: 4615), DTCRALK (SEQ ID NO: 4616), DTCRALNK (SEQ ID NO: 4617), DTCRALNAK (SEQ ID NO: 4618), DTCRALNAQK (SEQ ID NO: 4619), DTCRALNALK (SEQ ID NO: 4620), DTCRALNAQGK (SEQ ID NO: 4621), DTCRALNALGK (SEQ ID NO: 4622), DITCRALK (SEQ ID NO: 4623), DITCRALNK (SEQ ID NO: 4624), DITCRALNAK (SEQ ID NO: 4625), DITCRALNAQK (SEQ ID NO: 4626), DITCRALNALK (SEQ ID NO: 4627), DITCRALNAQGK (SEQ ID NO: 4628), DITCRALNALGK (SEQ ID NO: 4629), KRALD (SEQ ID NO: 4630), KRALND (SEQ ID NO: 4631), KRALNAD (SEQ ID NO: 4632), KRALNAQD (SEQ ID NO: 4633), KRALNALD (SEQ ID NO: 4634), KRALNAQGD (SEQ ID NO: 4635), KRALNALGD (SEQ ID NO: 4636), KCRALD (SEQ ID NO: 4637), KCRALND (SEQ ID NO: 4638), KCRALNAD (SEQ ID NO: 4639), KCRALNAQD (SEQ ID NO: 4640), KCRALNALD (SEQ ID NO: 4641), KCRALNAQGD (SEQ ID NO: 4642), KCRALNALGD (SEQ ID NO: 4643), KTCRALD (SEQ ID NO: 4644), KTCRALND (SEQ ID NO: 4645), KTCRALNAD (SEQ ID NO: 4646), KTCRALNAQD (SEQ ID NO: 4647), KTCRALNALD (SEQ ID NO: 4648), KTCRALNAQGD (SEQ ID NO: 4649), KTCRALNALGD (SEQ ID NO: 4650), KITCRALD (SEQ ID NO: 4651), KITCRALND (SEQ ID NO: 4652), KITCRALNAD (SEQ ID NO: 4653), KITCRALNAQD (SEQ ID NO: 4654), KITCRALNALD (SEQ ID NO: 4655), KITCRALNAQGD (SEQ ID NO: 4656), KITCRALNALGD (SEQ ID NO: 4657), RALNA (SEQ ID NO: 4658), RALNAQ (SEQ ID NO: 4659), RALNAL (SEQ ID NO: 4660), RALNAQG (SEQ ID NO: 4661), RALNALG (SEQ ID NO: 4662), CRALN (SEQ ID NO: 4663), CRALNA (SEQ ID NO: 4664), CRALNAQ (SEQ ID NO: 4665), CRALNAL (SEQ ID NO: 4666), CRALNAQG (SEQ ID NO: 4667), CRALNALG (SEQ ID NO: 4668), TCRAL (SEQ ID NO: 4669), TCRALN (SEQ ID NO: 4670), TCRALNA (SEQ ID NO: 4671), TCRALNAQ (SEQ ID NO: 4672), TCRALNAL (SEQ ID NO: 4673), TCRALNAQG (SEQ ID NO: 4674), TCRALNALG (SEQ ID NO: 4675), ITCRAL (SEQ ID NO: 4676), ITCRALN (SEQ ID NO: 4677), ITCRALNA (SEQ ID NO: 4678), ITCRALNAQ (SEQ ID NO: 4679), ITCRALNAL (SEQ ID NO: 4680), ITCRALNAQG (SEQ ID NO: 4681) and ITCRALNALG (SEQ ID NO: 4682).

134. A polynucleotide encoding a modulating agent according to claim 130.

135. A modulating agent comprising an antibody or antigen-binding fragment thereof that:
(a) specifically binds to a desmoglein-3. CAR sequence according to claim 130; and
(b) modulates a desmoglein-mediated function.

136. A modulating agent according to claim 1, wherein the agent comprises one or more desmocollin-1 CAR sequences selected from the group consisting: of YAT, YATT (SEQ ID NO: 4130), YATTA (SEQ ID NO: 4131), YATTAD (SEQ ID NO: 4132), YATTADG (SEQ ID NO: 4133), GYAT (SEQ ID NO: 4134), GYATT (SEQ ID NO: 4135), GYATTA (SEQ ID NO: 4136), GYATTAD (SEQ ID NO: 4137), GYATTADG (SEQ ID NO: 4138), AYAT (SEQ ID NO: 4139), AYATT (SEQ ID NO: 4140), AYATTA (SEQ ID NO: 4141), AYATTAD (SEQ ID NO: 4142), AYATTADG (SEQ ID NO: 4143), YGYAT (SEQ ID NO: 4144), YGYATT (SEQ ID NO: 4145), YGYATTA (SEQ ID NO: 4146), YGYATTAD (SEQ ID NO: 4147), YGYATTADG (SEQ ID NO: 4148), YAYAT (SEQ ID NO: 4149), YAYATT (SEQ ID NO: 4150), YAYATTA (SEQ ID NO: 4151), YAYATTAD (SEQ ID NO: 4152), YAYATTADG (SEQ ID NO: 4153), LYGYAT (SEQ ID NO: 4154), LYGYATT (SEQ ID NO: 4155), LYGYATTA (SEQ ID NO: 4156), LYGYATTAD (SEQ ID NO: 4157), LYGYATTADG (SEQ ID NO: 4158), LYAYAT (SEQ ID NO: 4159), LYAYATT (SEQ ID NO: 4160), LYAYATTA (SEQ ID NO: 4161), LYAYATTAD (SEQ ID NO: 4162), LYAYATTADG (SEQ ID NO: 4163), VYGYAT (SEQ ID NO: 4164), VYGYATT (SEQ ID NO: 4165), VYGYATTA (SEQ ID NO: 4166), VYGYATTAD (SEQ ID NO: 4167), VYGYATTADG (SEQ ID NO: 4168), VYAYAT (SEQ ID NO: 4169), VYAYATT (SEQ ID NO: 4170), VYAYATTA (SEQ ID NO: 4171), VYAYATTAD (SEQ ID NO: 4172), VYAYATTADG (SEQ ID NO: 4173), IYGYAT (SEQ ID NO: 4174), IYGYATT (SEQ ID NO: 4175), IYGYATTA (SEQ ID NO: 4176), IYGYATTAD (SEQ ID NO: 4177), IYGYATTADG (SEQ ID NO: 4178), IYAYAT (SEQ ID NO: 4179), IYAYATT (SEQ ID NO: 4180), IYAYATTA (SEQ ID NO: 4181), IYAYATTAD (SEQ ID NO: 4182) or IYAYATTADG (SEQ ID NO: 4183); or (b) an analogue of any of the foregoing sequences that differs in one or more substitutions, deletions, additions and/or insertions such that that ability of the analogue to modulate a desmocollin-mediated function is not substantially diminished.

137. A modulating agent according to claim 136, wherein the agent comprises a linear peptide having the sequence N-Ac-LYGYATTADG-NH2 (SEQ ID NO: 4184) N-Ac-LYAYATTADG-NH2 (SEQ ID NO: 4185) N-Ac-VYGYATTADG-NH2 (SEQ ID NO: 4186) N-Ac-VYAYATTADG-NH2 (SEQ ID NO: 4187) N-Ac-IYGYATTADG-NH2 (SEQ ID NO: 4188) and N-Ac-IYAYATTADG-NH2 (SEQ ID NO: 4189).

138. A modulating agent according to claim 136, wherein a desmocollin-1 CAR sequence is present within a cyclic peptide.

139. A modulating agent according to claim 138, wherein the cyclic peptide comprises a sequence selected from the group consisting of CYATC (SEQ ID NO: 4683), CYATTC (SEQ ID NO: 4684), CYATTAC (SEQ ID NO: 4685), CYATTADC (SEQ ID NO: 4686), CYATTADGC (SEQ ID NO: 4687), CGYATC (SEQ ID NO: 4688), CGYATTC (SEQ ID NO: 4689), CGYATTAC (SEQ ID NO: 4690), CGYATTADC (SEQ ID NO: 4691), CGYATTADGC (SEQ ID NO: 4692), CAYATC (SEQ ID NO: 4693), CAYATTC (SEQ ID NO: 4694), CAYATTAC (SEQ ID NO: 4695), CAYATTADC (SEQ ID NO: 4696), CAYATTADGC (SEQ ID NO: 4697), CYGYATC (SEQ ID NO: 4698), CYGYATTC (SEQ ID NO: 4699), CYGYATTAC (SEQ ID NO: 4700), CYGYATTADC (SEQ ID NO: 4701), CYGYATTADGC (SEQ ID NO: 4702), CYAYATC (SEQ ID NO: 4703), CYAYATTC (SEQ ID NO: 4704), CYAYATTAC (SEQ ID NO: 4705), CYAYATTADC (SEQ ID NO: 4706), CYAYATTADGC (SEQ ID NO: 4707), CLYGYATC (SEQ ID NO: 4708), CLYGYATTC (SEQ ID NO: 4709), CLYGYATTAC (SEQ ID NO: 4710), CLYGYATTADC (SEQ ID NO: 4711), CLYGYATTADGC (SEQ ID NO: 4712), CLYAYATC (SEQ ID NO: 4713), CLYAYATTC (SEQ ID NO: 4714), CLYAYATTAC (SEQ ID NO: 4715), CLYAYATTADC (SEQ ID NO: 4716), CLYAYATTADGC (SEQ ID NO: 4717), CVYGYATC (SEQ ID NO: 4718), CVYGYATTC (SEQ ID NO: 4719), CVYGYATTAC (SEQ ID NO: 4720), CVYGYATTADC (SEQ ID NO: 4721), CVYGYATTADGC (SEQ ID NO: 4722), CVYAYATC (SEQ ID NO: 4723), CVYAYATTC (SEQ ID NO: 4724), CVYAYATTAC (SEQ ID NO: 4725), CVYAYATTADC (SEQ ID NO: 4726), CVYAYATTADGC (SEQ ID NO: 4227), CIYGYATC (SEQ ID NO: 4728), CIYGYATTC (SEQ ID NO: 4729), CIYGYATTAC (SEQ ID NO: 4730), CIYGYATTADC (SEQ ID NO: 4731), CIYGYATTADGC (SEQ ID NO: 4732), CIYAYATC (SEQ ID NO: 4733), CIYAYATTC (SEQ ID NO: 4734), CIYAYATTAC (SEQ ID NO: 4735), CIYAYATTADC (SEQ ID NO: 4736), CIYAYATTADGC (SEQ ID NO: 4737), EYATK (SEQ ID NO: 4738), EYATTK (SEQ ID NO: 4739), EYATTAK (SEQ ID NO: 4740), EYATTADK (SEQ ID NO: 4741), EYATTADGK (SEQ ID NO: 4742), EGYATK (SEQ ID NO: 4743), EGYATTK (SEQ ID NO: 4744), EGYATTAK (SEQ ID NO: 4745), EGYATTADK (SEQ ID NO: 4746), EGYATTADGK (SEQ ID NO: 4747), EAYATK (SEQ ID NO: 4748), EAYATTK (SEQ ID NO: 4749), EAYATTAK (SEQ ID NO: 4750), EAYATTADK (SEQ ID NO: 4751), EAYATTADGK (SEQ ID NO: 4752), EYGYATK (SEQ ID NO: 4753), EYGYATTK (SEQ ID NO: 4754), EYGYATTAK (SEQ ID NO: 4755), EYGYATTADK (SEQ ID NO: 4756), EYGYATTADGK (SEQ ID NO: 4757), EYAYATK (SEQ ID NO: 4758), EYAYATTK (SEQ ID NO: 4759), EYAYATTAK (SEQ ID NO: 4760), EYAYATTADK (SEQ ID NO: 4761), EYAYATTADGK (SEQ ID NO: 4762), ELYGYATK (SEQ ID NO: 4763), ELYGYATTK (SEQ ID NO: 4764), ELYGYATTAK (SEQ ID NO: 4765), ELYGYATTADK (SEQ ID NO: 4766), ELYGYATTADGK (SEQ ID NO: 4767), ELYAYATK (SEQ ID NO: 4768), ELYAYATTK (SEQ ID NO: 4769), ELYAYATTAK (SEQ ID NO: 4770), ELYAYATTADK (SEQ ID NO: 4771), ELYAYATTADGK (SEQ ID NO: 4772), EVYGYATK (SEQ ID NO: 4773), EVYGYATTK (SEQ ID NO: 4774), EVYGYATTAK (SEQ ID NO: 4775), EVYGYATTADK (SEQ ID NO: 4776), EVYGYATTADGK (SEQ ID NO: 4777), EVYAYATK (SEQ ID NO: 4778), EVYAYATTK (SEQ ID NO: 4779), EVYAYATTAK (SEQ ID NO: 4780), EVYAYATTADK (SEQ ID NO: 4781), EVYAYATTADGK (SEQ ID NO: 4782), EIYGYATK (SEQ ID NO: 4783), EIYGYATTK (SEQ ID NO: 4784), EIYGYATTAK (SEQ ID NO: 4785), EIYGYATTADK (SEQ ID NO: 4786), EIYGYATTADGK (SEQ ID NO: 4787), EIYAYATK (SEQ ID NO: 4788), EIYAYATTK (SEQ ID NO: 4789), EIYAYATTAK (SEQ ID NO: 4790), EIYAYATTADK (SEQ ID NO: 4791), EIYAYATTADGK (SEQ ID NO: 4792), KYATE (SEQ ID NO: 4793), KYATTE (SEQ ID NO: 4794), KYATTAE (SEQ ID NO: 4795), KYATTADE (SEQ ID NO: 4796), KYATTADGE (SEQ ID NO: 4797), KGYATE (SEQ ID NO: 4798), KGYATTE (SEQ ID NO: 4799), KGYATTAE (SEQ ID NO: 4800), KGYATTADE (SEQ ID NO: 4801), KGYATTADGE (SEQ ID NO: 4802), KAYATE (SEQ ID NO: 4803), KAYATTE (SEQ ID NO: 4804), KAYATTAE (SEQ ID NO: 4805), KAYATTADE (SEQ ID NO: 4806), KAYATTADGE (SEQ ID NO: 4807), KYGYATE (SEQ ID NO: 4808), KYGYATTE (SEQ ID NO: 4809), KYGYATTAE (SEQ ID NO: 4810), KYGYATTADE (SEQ ID NO: 4811), KYGYATTADGE (SEQ ID NO: 4812), KYAYATE (SEQ ID NO: 4813), KYAYATTE (SEQ ID NO: 4814), KYAYATTAE (SEQ ID NO: 4815), KYAYATTADE (SEQ ID NO: 4816), KYAYATTADGE (SEQ ID NO: 4817), KLYGYATE (SEQ ID NO: 4818), KLYGYATTE (SEQ ID NO: 4819), KLYGYATTAE (SEQ ID NO: 4820), KLYGYATTADE (SEQ ID NO: 4821), KLYGYATTADGE (SEQ ID NO: 4822), KLYAYATE (SEQ ID NO: 4823), KLYAYATTE (SEQ ID NO: 4824), KLYAYATTAE (SEQ ID NO: 4825), KLYAYATTADE (SEQ ID NO: 4826), KLYAYATTADGE (SEQ ID NO: 4827), KVYGYATE (SEQ ID NO: 4828), KVYGYATTE (SEQ ID NO: 4829), KVYGYATTAE (SEQ ID NO: 4830), KVYGYATTADE (SEQ ID NO: 4831), KVYGYATTADGE (SEQ ID NO: 4832), KVYAYATE (SEQ ID NO: 4833), KVYAYATTE (SEQ ID NO: 4834), KVYAYATTAE (SEQ ID NO: 4835), KVYAYATTADE (SEQ ID NO: 4836), KVYAYATTADGE (SEQ ID NO: 4837), KIYGYATE (SEQ ID NO: 4838), KIYGYATTE (SEQ ID NO: 4839), KIYGYATTAE (SEQ ID NO: 4840), KIYGYATTADE (SEQ ID NO: 4841), KIYGYATTADGE (SEQ ID NO: 4842), KIYAYATE (SEQ ID NO: 4843), KIYAYATTE (SEQ ID NO: 4844), KIYAYATTAE (SEQ ID NO: 4845), KIYAYATTADE (SEQ ID NO: 4846), KIYAYATTADGE (SEQ ID NO: 4847), DYATK (SEQ ID NO: 4848), DYATTK (SEQ ID NO: 4849), DYATTAK (SEQ ID NO: 4850), DYATTADK (SEQ ID NO: 4851), DYATTADGK (SEQ ID NO: 4852), DGYATK (SEQ ID NO: 4853), DGYATTK (SEQ ID NO: 4854), DGYATTAK (SEQ ID NO: 4855), DGYATTADK (SEQ ID NO: 4856), DGYATTADGK (SEQ ID NO: 4857), DAYATK (SEQ ID NO: 4858), DAYATTK (SEQ ID NO: 4859), DAYATTAK (SEQ ID NO: 4860), DAYATTADK (SEQ ID NO: 4861), DAYATTADGK (SEQ ID NO: 4862), DYGYATK (SEQ ID NO: 4863), DYGYATTK (SEQ ID NO: 4864), DYGYATTAK (SEQ ID NO: 4865), DYGYATTADK (SEQ ID NO: 4866), DYGYATTADGK (SEQ ID NO: 4867), DYAYATK (SEQ ID NO: 4868), DYAYATTK (SEQ ID NO: 4869), DYAYATTAK (SEQ ID NO: 4870), DYAYATTADK (SEQ ID NO: 4871), DYAYATTADGK (SEQ ID NO: 4872), DLYGYATK (SEQ ID NO: 4873), DLYGYATTK (SEQ ID NO: 4874), DLYGYATTAK (SEQ ID NO: 4875), DLYGYATTADK (SEQ ID NO: 4876), DLYGYATTADGK (SEQ ID NO: 4877), DLYAYATK (SEQ ID NO: 4878), DLYAYATTK (SEQ ID NO: 4879), DLYAYATTAK (SEQ ID NO: 4880), DLYAYATTADK (SEQ ID NO: 4881), DLYAYATTADGK (SEQ ID NO: 4882), DVYGYATK (SEQ ID NO: 4883), DVYGYATTK (SEQ ID NO: 4884), DVYGYATTAK (SEQ ID NO: 4885), DVYGYATTADK (SEQ ID NO: 4886), DVYGYATTADGK (SEQ ID NO: 4887), DVYAYATK (SEQ ID NO: 4888), DVYAYATTK (SEQ ID NO: 4889), DVYAYATTAK (SEQ ID NO: 4890), DVYAYATTADK (SEQ ID NO: 4891), DVYAYATTADGK (SEQ ID NO: 4892), DIYGYATK (SEQ ID NO: 4893), DIYGYATTK (SEQ ID NO: 4894), DIYGYATTAK (SEQ ID NO: 4895), DIYGYATTADK (SEQ ID NO: 4896), DIYGYATTADGK (SEQ ID NO: 4897), DIYAYATK (SEQ ID NO: 4898), DIYAYATTK (SEQ ID NO: 4899), DIYAYATTAK (SEQ ID NO: 4900), DIYAYATTADK (SEQ ID NO: 4901), DIYAYATTADGK (SEQ ID NO: 4902), KYATD (SEQ ID NO: 4903), KYATTD (SEQ ID NO: 4904), KYATTAD (SEQ ID NO: 4905), KYATTADD (SEQ ID NO: 4906), KYATTADGD (SEQ ID NO: 4907), KGYATD (SEQ ID NO: 4908), KGYATTD (SEQ ID NO: 4909), KGYATTAD (SEQ ID NO: 4910), KGYATTADD (SEQ ID NO: 4911), KGYATTADGD (SEQ ID NO: 4912), KAYATD (SEQ ID NO: 4913), KAYATTD (SEQ ID NO: 4914), KAYATTAD (SEQ ID NO: 4915), KAYATTADD (SEQ ID NO: 4916), KAYATTADGD (SEQ ID NO: 4917), KYGYATD (SEQ ID NO: 4918), KYGYATTD (SEQ ID NO: 4919), KYGYATTAD (SEQ ID NO: 4920), KYGYATTADD (SEQ ID NO: 4921), KYGYATTADGD (SEQ ID NO: 4922), KYAYATD (SEQ ID NO: 4923), KYAYATTD (SEQ ID NO: 4924), KYAYATTAD (SEQ ID NO: 4925), KYAYATTADD (SEQ ID NO: 4926), KYAYATTADGD (SEQ ID NO: 4927), KLYGYATD (SEQ ID NO: 4928), KLYGYATTD (SEQ ID NO: 4929), KLYGYATTAD (SEQ ID NO: 4930), KLYGYATTADD (SEQ ID NO: 4931), KLYGYATTADGD (SEQ ID NO: 4932), KLYAYATD (SEQ ID NO: 4933), KLYAYATTD (SEQ ID NO: 4934), KLYAYATTAD (SEQ ID NO: 4395), KLYAYATTADD (SEQ ID NO: 4936), KLYAYATTADGD (SEQ ID NO: 4937), KVYGYATD (SEQ ID NO: 4938), KVYGYATTD (SEQ ID NO: 4939), KVYGYATTAD (SEQ ID NO: 4940), KVYGYATTADD (SEQ ID NO: 4941), KVYGYATTADGD (SEQ ID NO: 4942), KVYAYATD (SEQ ID NO: 4943), KVYAYATTD (SEQ ID NO: 4944), KVYAYATTAD (SEQ ID NO: 4945), KVYAYATTADD (SEQ ID NO: 4946), KVYAYATTADGD (SEQ ID NO: 4947), KIYGYATD (SEQ ID NO: 4948), KIYGYATTD (SEQ ID NO: 4949), KIYGYATTAD (SEQ ID NO: 4950), KIYGYATTADD (SEQ ID NO: 4951), KIYGYATTADGD (SEQ ID NO: 4952), KIYAYATD (SEQ ID NO: 4953), KIYAYATTD (SEQ ID NO: 4954), KIYAYATTAD (SEQ ID NO: 4955), KIYAYATTADD (SEQ ID NO: 4956), KIYAYATTADGD (SEQ ID NO: 4957), YATTA (SEQ ID NO: 4958), YATTAD (SEQ ID NO: 4959), YATTADG (SEQ ID NO: 4960), GYATT (SEQ ID NO: 4961), GYATTA (SEQ ID NO: 4962), GYATTAD (SEQ ID NO: 4963), GYATTADG (SEQ ID NO: 4964), AYATT (SEQ ID NO: 4965), AYATTA (SEQ ID NO: 4966), AYATTAD (SEQ ID NO: 4967), AYATTADG (SEQ ID NO: 4968), YGYAT (SEQ ID NO: 4969), YGYATT (SEQ ID NO: 4970), YGYATTA (SEQ ID NO: 4971), YGYATTAD (SEQ ID NO: 4972), YGYATTADG (SEQ ID NO: 4973), YAYAT (SEQ ID NO: 4974), YAYATT (SEQ ID NO: 4975), YAYATTA (SEQ ID NO: 4976), YAYATTAD (SEQ ID NO: 4977), YAYATTADG (SEQ ID NO: 4978), LYGYAT (SEQ ID NO: 4979), LYGYATT (SEQ ID NO: 4980), LYGYATTA (SEQ ID NO: 4981), LYGYATTAD (SEQ ID NO: 4982), LYGYATTADG (SEQ ID NO: 4983), LYAYAT (SEQ ID NO: 4984), LYAYATT (SEQ ID NO: 4985), LYAYATTA (SEQ ID NO: 4986), LYAYATTAD (SEQ ID NO: 4987), LYAYATTADG (SEQ ID NO: 4988), VYGYAT (SEQ ID NO: 4989), VYGYATT (SEQ ID NO: 4990), VYGYATTA (SEQ ID NO: 4991), VYGYATTAD (SEQ ID NO: 4992), VYGYATTADG (SEQ ID NO: 4993), VYAYAT (SEQ ID NO: 4994), VYAYATT (SEQ ID NO: 4995), VYAYATTA (SEQ ID NO: 4996), VYAYATTAD (SEQ ID NO: 4997), VYAYATTADG (SEQ ID NO: 4998), IYGYAT (SEQ ID NO: 4999), IYGYATT (SEQ ID NO: 5000), IYGYATTA (SEQ ID NO: 5001), IYGYATTAD (SEQ ID NO: 5002), IYGYATTADG (SEQ ID NO: 5003), IYAYAT (SEQ ID NO: 5004), IYAYATT (SEQ ID NO: 5005), IYAYATTA (SEQ ID NO: 5006), IYAYATTAD (SEQ ID NO: 5007) and IYAYATTADG (SEQ ID NO: 5008).

140. A polynucleotide encoding a modulating agent according to claim 136.

141. A modulating agent comprising an antibody or antigen-binding fragment thereof that:
(a) specifically binds to a desmocollin-1 CAR sequence according to claim 136; and
(b) modulates a desmocollin-mediated function.

142. A modulating agent according to claim 1, wherein the agent comprises one or more desmocollin-2 CAR sequences selected from the group consisting: of FAT, FATT (SEQ ID NO: 4190), FATTP (SEQ ID NO: 4191), FATTPD (SEQ ID NO: 4192), FATTPDG (SEQ ID NO: 4193), AFAT (SEQ ID NO: 4194), AFATT (SEQ ID NO: 4195), AFATTP (SEQ ID NO: 4196), AFATTPD (SEQ ID NO: 4197), AFATTPDG (SEQ ID NO: 4198), IAFAT (SEQ ID NO: 4199), IAFATT (SEQ ID NO: 4200), IAFATTP (SEQ ID NO: 4201), IAFATTPD (SEQ ID NO: 4202), IAFATTPDG (SEQ ID NO: 4203), IIAFAT (SEQ ID NO: 4204), IIAFATT (SEQ ID NO: 4205), IIAFATTP (SEQ ID NO: 4206), IIAFATTPD (SEQ ID NO: 4207), IIAFATTPDG (SEQ ID NO: 4208), LIAFAT (SEQ ID NO: 4209), LIAFATT (SEQ ID NO: 4210), LIAFATTP (SEQ ID NO: 4211), LIAFATTPD (SEQ ID NO: 4212), LIAFATTPDG (SEQ ID NO: 4213); or (b) an analogue of any of the foregoing sequences that differs in one or more substitutions, deletions, additions and/or insertions such that that ability of the analogue to modulate a desmocollin-mediated function is not substantially diminished.

143. A modulating agent according to claim 142, wherein the agent comprises a linear peptide having the sequence N-Ac-IIAFATTPDG-NH2 (SEQ ID NO: 4214) and N-Ac-LIAFATTPDG-NH2 (SEQ ID NO: 4215).

144. A modulating agent according to claim 142, wherein a desmocollin-2 CAR sequence is present within a cyclic peptide.

145. A modulating agent according to claim 144, wherein the cyclic peptide comprises a sequence selected from the group consisting of CFATC (SEQ ID NO: 5009), CFATTC (SEQ ID NO: 5010), CFATTPC (SEQ ID NO: 5011), CFATTPDC (SEQ ID NO: 5012), CFATTPDGC (SEQ ID NO: 5013), CAFATC (SEQ ID NO: 5014), CAFATTC (SEQ ID NO: 5015), CAFATTPC (SEQ ID NO: 5016), CAFATTPDC (SEQ ID NO: 5017), CAFATTPDGC (SEQ ID NO: 5018), CIAFATC (SEQ ID NO: 5019), CIAFATTC (SEQ ID NO: 5020), CIAFATTPC (SEQ ID NO: 5021), CIAFATTPDC (SEQ ID NO: 5022), CIAFATTPDGC (SEQ ID NO: 5023), CIIAFATC (SEQ ID NO: 5024), CIIAFATTC (SEQ ID NO: 5025), CIIAFATTPC (SEQ ID NO: 5026), CIIAFATTPDC (SEQ ID NO: 5027), CIIAFATTPDGC (SEQ ID NO: 5028), CLIAFATC (SEQ ID NO: 5029), CLIAFATTC (SEQ ID NO: 5030), CLIAFATTPC (SEQ ID NO: 5031), CLIAFATTPDC (SEQ ID NO: 5032), CLIAFATTPDGC (SEQ ID NO: 5033), EFATK (SEQ ID NO: 5034), EFATTK (SEQ ID NO: 5035), EFATTPK (SEQ ID NO: 5036), EFATTPDK (SEQ ID NO: 5037), EFATTPDGK (SEQ ID NO: 5038), EAFATK (SEQ ID NO: 5039), EAFATTK (SEQ ID NO: 5040), EAFATTPK (SEQ ID NO: 5041), EAFATTPDK (SEQ ID NO: 5042), EAFATTPDGK (SEQ ID NO: 5043), EIAFATK (SEQ ID NO: 5044), EIAFATTK (SEQ ID NO: 5045), EIAFATTPK (SEQ ID NO: 5046), EIAFATTPDK (SEQ ID NO: 5047), EIAFATTPDGK (SEQ ID NO: 5048), EIIAFATK (SEQ ID NO: 5049), EIIAFATTK (SEQ ID NO: 5050), EIIAFATTPK (SEQ ID NO: 5051), EIIAFATTPDK (SEQ ID NO: 5052), EIIAFATTPDGK (SEQ ID NO: 5053), ELIAFATK (SEQ ID NO: 5054), ELIAFATTK (SEQ ID NO: 5055), ELIAFATTPK (SEQ ID NO: 5056), ELIAFATTPDK (SEQ ID NO: 5057), ELIAFATTPDGK (SEQ ID NO: 5058), KFATE (SEQ ID NO: 5059), KFATTE (SEQ ID NO: 5060), KFATTPE (SEQ ID NO: 5061), KFATTPDE (SEQ ID NO: 5062), KFATTPDGE (SEQ ID NO: 5063), KAFATE (SEQ ID NO: 5064), KAFATTE (SEQ ID NO: 5065), KAFATTPE (SEQ ID NO: 5066), KAFATTPDE (SEQ ID NO: 5067), KAFATTPDGE (SEQ ID NO: 5068), KIAFATE (SEQ ID NO: 5069), KIAFATTE (SEQ ID NO: 5070), KIAFATTPE (SEQ ID NO: 5071), KIAFATTPDE (SEQ ID NO: 5072), KIAFATTPDGE (SEQ ID NO: 5073), KIIAFATE (SEQ ID NO: 5074), KIIAFATTE (SEQ ID NO: 5075), KIIAFATTPE (SEQ ID NO: 5076), KIIAFATTPDE (SEQ ID NO: 5077), KIIAFATTPDGE (SEQ ID NO: 5078), KLIAFATE (SEQ ID NO: 5079), KLIAFATTE (SEQ ID NO: 5080), KLIAFATTPE (SEQ ID NO: 5081), KLIAFATTPDE (SEQ ID NO: 5082), KLIAFATTPDGE (SEQ ID NO: 5083), DFATK (SEQ ID NO: 5084), DFATTK (SEQ ID NO: 5085), DFATTPK (SEQ ID NO: 5086), DFATTPDK (SEQ ID NO: 5087), DFATTPDGK (SEQ ID NO: 5088), DAFATK (SEQ ID NO: 5089), DAFATTK (SEQ ID NO: 5090), DAFATTPK (SEQ ID NO: 5091), DAFATTPDK (SEQ ID NO: 5092), DAFATTPDGK (SEQ ID NO: 5093), DIAFATK (SEQ ID NO: 5094), DIAFATTK (SEQ ID NO: 5095), DIAFATTPK (SEQ ID NO: 5096), DIAFATTPDK (SEQ ID NO: 5097), DIAFATTPDGK (SEQ ID NO: 5098), DIIAFATK (SEQ ID NO: 5099), DIIAFATTK (SEQ ID NO: 5100), DIIAFATTPK (SEQ ID NO: 5101), DIIAFATTPDK (SEQ ID NO: 5102), DIIAFATTPDGK (SEQ ID NO: 5103), DLIAFATK (SEQ ID NO: 5104), DLIAFATTK (SEQ ID NO: 5105), DLIAFATTPK (SEQ ID NO: 5106), DLIAFATTPDK (SEQ ID NO: 5107), DLIAFATTPDGK (SEQ ID NO: 5108), KFATD (SEQ ID NO: 5109), KFATTD (SEQ ID NO: 5110), KFATTPD (SEQ ID NO: 5111), KFATTPDD (SEQ ID NO: 5112), KFATTPDGD (SEQ ID NO: 5113), KAFATD (SEQ ID NO: 5114), KAFATTD (SEQ ID NO: 5115), KAFATTPD (SEQ ID NO: 5116), KAFATTPDD (SEQ ID NO: 5117), KAFATTPDGD (SEQ ID NO: 5118), KIAFATD (SEQ ID NO: 5119), KIAFATTD (SEQ ID NO: 5120), KIAFATTPD (SEQ ID NO: 5121), KIAFATTPDD (SEQ ID NO: 5122), KIAFATTPDGD (SEQ ID NO: 5123), KIIAFATD (SEQ ID NO: 5124), KIIAFATTD (SEQ ID NO: 5125), KIIAFATTPD (SEQ ID NO: 5126), KIIAFATTPDD (SEQ ID NO: 5127), KIIAFATTPDGD (SEQ ID NO: 5128), KLIAFATD (SEQ ID NO: 5129), KLIAFATTD (SEQ ID NO: 5130), KLIAFATTPD (SEQ ID NO: 5131), KLIAFATTPDD (SEQ ID NO: 5132), KLIAFATTPDGD (SEQ ID NO: 5133), FATTP (SEQ ID NO: 5134), FATTPD (SEQ ID NO: 5135), FATTPDG (SEQ ID NO: 5136), AFATT (SEQ ID NO: 5137), AFATTP (SEQ ID NO: 5138), AFATTPD (SEQ ID NO: 5139), AFATTPDG (SEQ ID NO: 5140), IAFAT (SEQ ID NO: 5141), IAFATT (SEQ ID NO: 5142), IAFATTP (SEQ ID NO: 5143), IAFATTPD (SEQ ID NO: 5144), IAFATTPDG (SEQ ID NO: 5145), IIAFAT (SEQ ID NO: 5146), IIAFATT (SEQ ID NO: 5147), IIAFATTP (SEQ ID NO: 5148), IIAFATTPD (SEQ ID NO: 5149), IIAFATTPDG (SEQ ID NO: 5150), LIAFAT (SEQ ID NO: 5151), LIAFATT (SEQ ID NO: 5152), LIAFATTP (SEQ ID NO: 5153), LIAFATTPD (SEQ ID NO: 5154), LIAFATTPDG (SEQ ID NO: 5155).

146. A polynucleotide encoding a modulating agent according to claim 142.

147. A modulating agent comprising an antibody or antigen-binding fragment thereof that:
(a) specifically binds to a desmocollin-2 CAR sequence according to claim 142; and
(b) modulates a desmocollin-mediated function.

148. A modulating agent according to claim 1, wherein the agent comprises one or more desmocollin-3 or desmocollin-4 CAR sequences selected from the group consisting of YAS, YAST (SEQ ID NO:312 4216), YASTA (SEQ ID NO: 4217), YASTAD (SEQ ID NO: 4218), YASTADG (SEQ ID NO: 4219), AYAS (SEQ ID NO: 4220), AYAST (SEQ ID NO: 4221), AYASTA (SEQ ID NO: 4222), AYASTAD (SEQ ID NO: 4223), AYASTADG (SEQ ID NO: 4224), IAYAS (SEQ ID NO: 4225), IAYAST (SEQ ID NO: 4226), IAYASTA (SEQ ID NO: 4227), IAYASTAD (SEQ ID NO: 4228), IAYASTADG (SEQ ID NO: 4229), LIAYAS (SEQ ID NO: 4230), LIAYAST (SEQ ID NO: 4231), LIAYASTA (SEQ ID NO: 4232), LIAYASTAD (SEQ ID NO: 4233), LIAYASTADG (SEQ ID NO: 4234); or (b) an analogue of any of the foregoing sequences that differs in one or more substitutions, deletions, additions and/or insertions such that that ability of the analogue to modulate a desmocollin-mediated function is not substantially diminished.

149. A modulating agent according to claim 148, wherein the agent comprises a linear peptide having the sequence N-Ac-LIAYASTADG-NH2 (SEQ ID NO: 4235).

150. A modulating agent according to claim 148, wherein a desmocollin-3 or desmocollin-4 CAR sequence is present within a cyclic peptide.

151. A modulating agent according to claim 150, wherein the cyclic peptide comprises a sequence selected from the group consisting of CYASC (SEQ ID NO: 5156), CYASTC (SEQ ID NO: 5157), CYASTAC (SEQ ID NO: 5158), CYASTADC (SEQ ID NO: 5159), CYASTADGC (SEQ ID NO: 5160), CAYASC (SEQ ID NO: 5161), CAYASTC (SEQ ID NO: 5162), CAYASTAC (SEQ ID NO: 5.163), CAYASTADC (SEQ ID NO: 5164), CAYASTADGC (SEQ ID NO: 5165), CIAYASC (SEQ ID NO: 5166), CIAYASTC (SEQ ID NO: 5167), CIAYASTAC (SEQ ID NO: 5168), CIAYASTADC (SEQ ID NO: 5169), CIAYASTADGC (SEQ ID NO: 5170), CLIAYASC (SEQ ID NO: 5171), CLIAYASTC (SEQ ID NO: 5172), CLIAYASTAC (SEQ ID NO: 5173), CLIAYASTADC (SEQ ID NO: 5174), CLIAYASTADGC (SEQ ID NO: 5175), EYASK (SEQ ID NO: 5176), EYASTK (SEQ ID NO: 5177), EYASTAK (SEQ ID NO: 5178), EYASTADK (SEQ ID NO: 5179), EYASTADGK (SEQ ID NO: 5180), EAYASK (SEQ ID NO: 5181), EAYASTK (SEQ ID NO: 5182), EAYASTAK (SEQ ID NO: 5183), EAYASTADK (SEQ ID NO: 5184), EAYASTADGK (SEQ ID NO: 5185), EIAYASK (SEQ ID NO: 5186), EIAYASTK (SEQ ID NO: 5187), EIAYASTAK (SEQ ID NO: 5188), EIAYASTADK (SEQ ID NO: 5189), EIAYASTADGK (SEQ ID NO: 5190), ELIAYASK (SEQ ID NO: 5191), ELIAYASTK (SEQ ID NO: 5192), ELIAYASTAK (SEQ ID NO: 5193), ELIAYASTADK (SEQ ID NO: 5194), ELIAYASTADGK (SEQ ID NO: 5195), KYASE (SEQ ID NO: 5196), KYASTE (SEQ ID NO: 5197), KYASTAE (SEQ ID NO: 5198), KYASTADE (SEQ ID NO: 5199), KYASTADGE (SEQ ID NO: 5200), KAYASE (SEQ ID NO: 5201), KAYASTE (SEQ ID NO: 5202), KAYASTAE (SEQ ID NO: 5203), KAYASTADE (SEQ ID NO: 5204), KAYASTADGE (SEQ ID NO: 5205), KIAYASE (SEQ ID NO: 5206), KIAYASTE (SEQ ID NO: 5207), KIAYASTAE (SEQ ID NO: 5208), KIAYASTADE (SEQ ID NO: 5209), KIAYASTADGE (SEQ ID NO: 5210), KLIAYASE (SEQ ID NO: 5211), KLIAYASTE (SEQ ID NO: 5212), KLIAYASTAE (SEQ ID NO: 5213), KLIAYASTADE (SEQ ID NO: 5214), KLIAYASTADGE (SEQ ID NO: 5215), DYASK (SEQ ID NO: 5216), DYASTK (SEQ ID NO: 5217), DYASTAK (SEQ ID NO: 5218), DYASTADK (SEQ ID NO: 5219), DYASTADGK (SEQ ID NO: 5220), DAYASK (SEQ ID NO: 5221), DAYASTK (SEQ ID NO: 5222), DAYASTAK (SEQ ID NO: 5223), DAYASTADK (SEQ ID NO: 5224), DAYASTADGK (SEQ ID NO: 5225), DIAYASK (SEQ ID NO: 5226), DIAYASTK (SEQ ID NO: 5227), DIAYASTAK (SEQ ID NO: 5228), DIAYASTADK (SEQ ID NO: 5229), DIAYASTADGK (SEQ ID NO: 5230), DLIAYASK (SEQ ID NO: 5231), DLIAYASTK (SEQ ID NO: 5232), DLIAYASTAK (SEQ ID NO: 5233), DLIAYASTADK (SEQ ID NO: 5234), DLIAYASTADGK (SEQ ID NO: 5235), KYASD (SEQ ID NO: 5236), KYASTD (SEQ ID NO: 5237), KYASTAD (SEQ ID NO: 5238), KYASTADD (SEQ ID NO: 5239), KYASTADGD (SEQ ID NO: 5240), KAYASD (SEQ ID NO: 5241), KAYASTD (SEQ ID NO: 5242), KAYASTAD (SEQ ID NO: 5243), KAYASTADD (SEQ ID NO: 5244), KAYASTADGD (SEQ ID NO: 5245), KIAYASD (SEQ ID NO: 5246), KIAYASTD (SEQ ID NO: 5247), KIAYASTAD (SEQ ID NO: 5248), KIAYASTADD (SEQ ID NO: 5249), KIAYASTADGD (SEQ ID NO: 5250), KLIAYASD (SEQ ID NO: 5251), KLIAYASTD (SEQ ID NO: 5252), KLIAYASTAD (SEQ ID NO: 5253), KLIAYASTADD (SEQ ID NO: 5254), KLIAYASTADGD (SEQ ID NO: 5255), YASTA (SEQ ID NO: 5256), YASTAD (SEQ ID NO: 5257), YASTADG (SEQ ID NO: 5258), AYAST (SEQ ID NO: 5259), AYASTA (SEQ ID NO: 5260), AYASTAD (SEQ ID NO: 5261), AYASTADG (SEQ ID NO: 5262), IAYAS (SEQ ID NO: 5263), IAYAST (SEQ ID NO: 5264), IAYASTA (SEQ ID NO: 5265), IAYASTAD (SEQ ID NO: 5266), IAYASTADG (SEQ ID NO: 5267), LIAYAS (SEQ ID NO: 5268), LIAYAST (SEQ ID NO: 5269), LIAYASTA (SEQ ID NO: 5270), LIAYASTAD (SEQ ID NO: 5271) and LIAYASTADG (SEQ ID NO: 5272).

152. A polynucleotide encoding a modulating agent according to claim 148.

153. A modulating agent comprising an antibody or antigen-binding fragment thereof that:
(a) specifically binds to a desmocollin-3 or desmocollin-4 CAR sequence according to claim 148; and
(b) modulates a desmocollin-mediated function.

The application's sequence listing, which the Patent Office published only in electronic form, follows.

SEQUENCE LISTING (5330 sequences)

SEQ ID NO: 1 - protein, 5 aa, Unknown
  VARIANT (2): Where Xaa is any amino acid
  Description of Unknown Organism:  Calcium Binding Motif in Extracellular domains of Classical Cadherins
DXNDN

SEQ ID NO: 2 - protein, 4 aa, Unknown
  Description of Unknown Organism:  Calcium Binding Motif in Extracellular domains of Classical Cadherins
LDRE

SEQ ID NO: 3 - protein, 9 aa, Unknown
  VARIANT (1): Residue is an independently selected amino acid
  VARIANT (3): Residue is an independently selected amino acid
  VARIANT (4): Where Xaa is Isoleucine, Leucine or Valine
  VARIANT (5): Where Xaa is Aspartic Acid, Asparagine or Glutamic Acid
  VARIANT (6): Residue is an independently selected amino acid
  VARIANT (7): Residue is an independently selected amino acid
  VARIANT (8): Where Xaa is Serine, Threonine or Asparagine
  Description of Unknown Organism:  Cell Adhesion Recognition Sequence of Nonclassical Cadherins
XFXXXXXXG

SEQ ID NO: 4 - protein, 110 aa, Homo sapiens
RSKRGWVWNQFFVIEEYTGPDPVLVGRLHSDIDSGDGNIKYILSGEGAGTIFVIDDKSGNIHATKTLDREERAQYTLMAQAVDRDTNRPLEPPSEFIVKVQDINDNPPEF

SEQ ID NO: 5 - protein, 109 aa, Homo sapiens
LHETYHANVPERSNVGTSVIQVTASDADDPTYGNSAKLVYSILEGQPYFSVEAQTGIIRTALPNMDREAKEEYHVVIQAKDMGGHMGGLSGTTKVTITLTDVNDNPPKF

SEQ ID NO: 6 - protein, 108 aa, Homo sapiens
RQKRDWIWNQMHIDEEKNTSLPHHVGKIKSSVSRKNAKYLLKGEYVGKVFRVDAETGDVFAIERLDRENISEYHLTAVIVDKDTGENLETPSSFTIKVHDVNDNWPVF

SEQ ID NO: 7 - protein, 110 aa, Homo sapiens
RSKRSWMWNQFFLLEEYTGSDYQYVGKLHSDQDRGDGSLKYILSGDGAGDLFIINENTGDIQATKRLDREEKPVYILRAQAINRRTGRPVEPESEFIIKIHDINDNEPIF

SEQ ID NO: 8 - protein, 109 aa, Homo sapiens
TKEVYTATVPEMSDVGTFVVQVTATDADDPTYGNSAKVVYSILQGQPYFSVESETGIIKTALLNMDRENREQYQVVIQAKDMGGQMGGLSGTTTVNITLTDVNDNPPRF

SEQ ID NO: 9 - protein, 105 aa, Homo sapiens
SKLAYILQIREDAQINTTIGSVTAQDPDAARNPVKYSVDRHTDMDRIFNIDSGNGSIFTSKLLDRETLLWHNITVIATEINNPKQSSRVPLYIKVLDVNDNAPEF

SEQ ID NO: 10 - protein, 110 aa, Gallus gallus
RTKRSWVWNQFFVLEEYMGSDPLYVGKLHSDVDKGDGSIKYILSGEGASSIFIIDENTGDIHATKRLDREEQAYYTLRAQAHDRLTNKPVEPESEFVIKIQDINDNEPKF

SEQ ID NO: 11 - protein, 109 aa, Gallus gallus
LDGPYTAGVPEMSPVGTSVVQVTATDADDPTYGNSARVVYSILQGQPYFSVEPKTGIIKTALPNMDREAKDQYLLVIQAKDMVGQNGGLSGTTSVTVTLTDVNDNPPRF

SEQ ID NO: 12 - protein, 105 aa, Gallus gallus
TSRLYSMVVSEAAKVGTIIGTVAAHDPDASNSPVRYSIDRNTDLERYFNIDANSGVITTAKSLDRETNAVHNITVLAMESQNPAQIGRGYVAITILDINDNAPEF

SEQ ID NO: 13 - protein, 110 aa, Homo sapiens
RSKRGWVWNQMFVLEEFSGPEPILVGRLHTDLDPGSKKIKYILSGDGAGTIFQINDVTGDIHAIKRLDREEKAEYTLTAQAVDWETSKPLEPPSEFIIKVQDINDNAPEF

SEQ ID NO: 14 - protein, 110 aa, Homo sapiens
RVKRGWVWNQFFVLEEYVGSEPQYVGKLHSDLDKGEGTVKYTLSGDGAGTVFTIDETTGDIHAIRSLDREEKPFYTLRAQAVDIETRKPLEPESEFIIKVQDINDNEPKF

SEQ ID NO: 15 - protein, 109 aa, Homo sapiens
LDGPYVATVPEMSPVGAYVLQVKATDADDPTYGNSARVVYSILQGQPYFSIDPKTGVIRTALPNMDREVKEQYQVLIQAKDMGGQLGGLAGTTIVNITLTDVNDNPPRF

SEQ ID NO: 16 - protein, 110 aa, Homo sapiens
RPKRGWVWNQFFVLEEHMGPDPQYVGKLHSNSDKGDGSVKYILTGEGAGTIFIIDDTTGDIHSTKSLDREQKTHYVLHAQAIDRRTNKPLEPESEFIIKVQDINDNAPKF

SEQ ID NO: 17 - protein, 109 aa, Homo sapiens
TDGPYIVTVPEMSDMGTSVLQVTATDADDPTYGNSARVVYSILQGQPYFSVDPKTGVIRTALHNMDREAREHYSVVIQAKDMAGQVGGLSGSTTVNITLTDVNDNPPRF

SEQ ID NO: 18 - protein, 105 aa, Homo sapiens
SMPSYLMEVYENAKIGTVVGTVLAQDPDSTNSLVRYFINYNVEDDRFFNIDANTGTIRTTKVLDREETPWYNITVTASEIDNPDLLSHVTVGIRVLDVNDNPPEL

SEQ ID NO: 19 - protein, 111 aa, Homo sapiens
RVRRAWVIPPISVSENHKRLPYPLVQIKSDKQQLGSVIYSIQGPGVDEEPRGVFSIDKFTGKVFLNAMLDREKTDRFRLRAFALDLGGSTLEDPTDLEIVVVDQNDNRPAF

SEQ ID NO: 20 - protein, 108 aa, Homo sapiens
LQEAFTGRVLEGAVPGTYVTRAEATDADDPETDNAALRFSILQQGSPELFSIDELTGEIRTVQVGLDREVVAVYNLTLQVADMSGDGLTATASAIITLDDINDNAPEF

SEQ ID NO: 21 - protein, 111 aa, Homo sapiens
RQKRSIVVSPILIPENQRQPFPRDVGKVVDSDRPERSKFRLTGKGVDQEPKGIFRINENTGSVSVTRTLDREVIAVYQLFVETTDVNGKTLEGPVPLEVIVIDQNDNRPIF

SEQ ID NO: 22 - protein, 110 aa, Rattus norvegicus
RVKRGWVWNQFFVVEEYTGTEPLYVGKIHSDSDEGDGTIKYTISGEGAGTIFLIDELTGDIHATERLDREQKTFYTLRAQARDRATNRLLEPESEFIIKVQDINDSEPRF

SEQ ID NO: 23 - protein, 109 aa, Rattus norvegicus
LHGPYIGSVAELSPTGTSVMQVMASDADDPTYGSSARLVYSVLDGEHHFTVDPKTGVIRTAVPDLDRESQERYEVVIQATDMAGQLGGLSGSTTVTIVVTDVNDNPPRF

SEQ ID NO: 24 - protein, 105 aa, Rattus norvegicus
RPPSGLLEVQEDAQVGSLVGVVTARDPDAANRPVRYAIDRDSDLEQIFDIDADTGAIVTGKGLDRETAGWHNITVLAMEADNHAQLSRASLRIRILDVNDNPPEL

SEQ ID NO: 25 - protein, 117 aa, Homo sapiens
LQSKYEGSVRQNSRPGKPFLYVNATDLDDPATPNGQLYYQIVIQLPMINNVMYFQINNKTGAISLTREGSQELNPAKNPYNLVISVKDMGGQSENSFSDTTSVDIIVTENIWKAPAP

SEQ ID NO: 26 - protein, 108 aa, Homo sapiens
NQSLYRARVPGGCTSGTRVVQVLATDLDEGPNGEIIYSFGSHNRAGVRQLFALDLVTGMLTIKGRLDFEDTKLHEIYIQAKDKGANPEGAHCKVLVEVVDVNDNAPEI

SEQ ID NO: 27 - protein, 110 aa, Homo sapiens
SQSSYDVYIEENNLPGAPILNLSVWDPDAPQNARLSFFLLEQGAETGLVGRYFTINRDNGIVSSLVPLDYEDRREFELTAHISDGGTPVLATNISVNIFVTDRNDNAPQV

SEQ ID NO: 28 - protein, 108 aa, Homo sapiens
EAPSYLVELPENTPLGTVVIDLNATDADEGPNGEVLYSFSSYVPDRVRELFSIDPKTGLIRVKGNLDYEENGMLEIDVQARDLGPNLIPAHCKVTVKLIDRNDNAPSI

SEQ ID NO: 29 - protein, 89 aa, Homo sapiens
VLPTLQNDTAELQVPRNAGLGYLVSTVRALDSDFGESGRLTYEIVDGNDDHLFEIDPSSGEIRTLHPFWEDVTPVVELVVKVTDHGKPT

SEQ ID NO: 30 - protein, 112 aa, Homo sapiens
RQKREWIKFAAACREGEDNSKRNPIAKIHSDCAANQQVTYRISGVGIDQPPYGIFVINQKTGEINITSIVDREVTPFFIIYCRALNSMGQDLERPLELRVRVLDINDNPPVF

SEQ ID NO: 31 - protein, 112 aa, Homo sapiens
SMATFAGQIEENSNANTLVMILNATDADEPNNLNSKIAFKIIRQEPSDSPMFIINRNTGEIRTMNNFLDREQYGQYALAVRGSDRDGGADGMSAECECNIKILDVNDNIPYM

SEQ ID NO: 32 - protein, 113 aa, Homo sapiens
TQDVFVGSVEELSAAHTLVMKINATDADEPNTLNSKISYRIVSLEPAYPPVFYLNKDTGEIYTTSVTLDREEHSSYTLTVEARDGNGEVTDKPVKQAQVQIRILDVNDNIPVV

SEQ ID NO: 33 - protein, 107 aa, Homo sapiens
RWAPIPASLMENSLGPFPQHVQQIQSDAAQNYTIFYSISGPGVDKEPFNLFYIEKDTGDIFCTRSIDREKYEQFALYGYATTADGYAPEYPLPLIIKIEDDNDNAPY

SEQ ID NO: 34 - protein, 107 aa, Homo sapiens
RWAPIPCSMLENSLGPFPLFLQQVQSDTAQNYTIYYSIRGPGVDQEPRNLFYVERDTGNLYCTRPVDREQYESFEIIAFATTPDGYTPELPLPLIIKIEDENDNYPI

SEQ ID NO: 35 - protein, 107 aa, Homo sapiens
RWAPIPCSMQENSLGPFPLFLQQVESDAAQNYTVFYSISGRGVDKEPLNLFYIERDTGNLFCTRPVDREEYDVFDLIAYASTADGYSADLPLPLPIRVEDENDNHPV

SEQ ID NO: 36 - protein, 107 aa, Homo sapiens; identical to SEQ ID NO: 35

SEQ ID NO: 37 - protein, 108 aa, Mus musculus
DRSLYTVKLPENVPNGTLVVKVNASDLDEGVNGDIMYSFSTDISPNVKYKFHIDPVSGEIIVKGYIDFEECKSYEILIEGIDKGQLPLSGHCKVIVQVEDINDNVPEL

SEQ ID NO: 38 - protein, 108 aa, Mus musculus
QHPEYEVRILENSDNGTTVIRLNASDKDEGTNSAISYSFNRLVPPKTLEQFSIDADTGEIITQGNLDFEQVDVYKIHVDATDKGHPPMVGHCTVLVKVLDENDNVPQI

SEQ ID NO: 39 - protein, 108 aa, Mus musculus
DRAIYRVKLVENARNGTVVIRLNASDLDEGSNGQILYSFAADVSPKTEATFHIDSVSGEIKVNGKIDFEETNLWKIQAEAVDKGSPPMFGHCTILIEVLDINDNAPKI

SEQ ID NO: 40 - protein, 108 aa, Mus musculus
DRFVYKVKVLEDALNGTLVINLNATDPDEGINGDIIYSFRRPVSPAVVHAFNIDSNSGEVRTKGLLDFEEIKLYEIPVEAVDKGNIPMTGHCTLLVELLDVNDNAPEV

SEQ ID NO: 41 - protein, 108 aa, Mus musculus
DKSIYNVRLLENTPNGTLVIKLNASDADEGINKEILYFFSNLVLDDVKSKFTIDSSSGEIKVKGELDYEDCKVYEINIDAVDRSAFPLAGHCKIIVKLVDVNDNVPEM

SEQ ID NO: 42 - protein, 107 aa, Mus musculus
DHLEYKVRIMENAAKETLVITLNATDLDEGANGQLVYSLMSIKPTGRHLFTLDEKNGELRVNGTLDYEENKLYEIEVLATDKGTPPMVGHCVVLVEILDTNDNSPEV

SEQ ID NO: 43 - protein, 108 aa, Mus musculus
DRSVYEVKMYENQENKTLVIWLNATDSDEGINKEVEYSFSSLASSIIRQKFLINEKTGEIKINGAIDFEESNNYEIHVDATDKGYPPMVAHCTVLVEILDENDNAPEI

SEQ ID NO: 44 - protein, 106 aa, Homo sapiens
GWVWNQFFVIEEYTGPDPVLVGRLHSDIDSGDGNIKYILSGEGAGTIFVIDDKSGNIHATKTLDREERAQYTLMAQAVDRDTNRPLEPPSEFIVKVQDINDNPPEF

SEQ ID NO: 45 - protein, 106 aa, Mus musculus; identical to SEQ ID NO: 44

SEQ ID NO: 46 - protein, 4 aa, Unknown
  Description of Unknown Organism:  Calcium Binding Motifs in the Extracellular Domains of Nonclassical Cadherins
  VARIANT (1): Where Xaa is any amino acid
  VARIANT (3): Where Xaa is any amino acid
XDXE

SEQ ID NO: 47 - protein, 5 aa, Unknown
  Description of Unknown Organism:  Calcium Binding Motifs in the Extracellular Domains of Nonclassical Cadherins
  VARIANT (2): Where Xaa is any amino acid
  VARIANT (3): Where Xaa is any amino acid
  VARIANT (5): Where Xaa is any amino acid
DXXDX

SEQ ID NO: 48 - protein, 5 aa, Unknown
  Description of Unknown Organism:  Clasical Cadherin Cell Adhesion Recognition Sequence
YIGSR

SEQ ID NO: 49 - protein, 10 aa, Unknown
  Description of Unknown Organism:  Clasical Cadherin Cell Adhesion Recognition Sequence
KYSFNYDGSE

SEQ ID NO: 50 - protein, 17 aa, Unknown
  Description of Unknown Organism:  N-CAM Heparin Sulfate-Binding Site
IWKHKGRDVILKKDVRF

SEQ ID NO: 51 - protein, 4 aa, Unknown
  Description of Unknown Organism:  Putative Claudin Cell Adhesion Recognition Sequence
IYSY

SEQ ID NO: 52 - protein, 4 aa, Unknown
  Description of Unknown Organism:  Occludin Cell Adhesion Recognition Sequence
LYHY

SEQ ID NO: 53 - protein, 10 aa, Artificial Sequence
  Cyclic Peptide
  VARIANT (2): Where Xaa is beta,beta-tetramethylene cysteine
  Description of Artificial Sequence:  Product of Synthesis and Cyclization based on Human OB-Cadherin
IXVIDDKSCE

SEQ ID NO: 54 - protein, 10 aa, Artificial Sequence
  Description of Artificial Sequence:  Product of Synthesis and Cyclization based on Human OB-Cadherin
  Cyclic Peptide
  VARIANT (2): Where Xaa is beta,beta-pentamethylene cysteine
IXVIDDKSGC

SEQ ID NO: 55 - protein, 9 aa, Artificial Sequence
  Description of Artificial Sequence:  Product of Synthesis and Cyclization based on Human OB-Cadherin
  Cyclic Peptide
  VARIANT (1): Where Xaa is beta-mercaptopropionic acid
XVIDDKSGC

SEQ ID NO: 56 - protein, 9 aa, Artificial Sequence
  Description of Artificial Sequence:  Product of Synthesis and Cyclization based on Human OB-Cadherin
  Cyclic Peptide
  VARIANT (1): Where Xaa is beta,beta-pentamethylene-beta-mercaptopropionic acid
XVIDDKSGC

SEQ ID NO: 57 - protein, 5 aa, Artificial Sequence
  Cyclic Peptide
  VARIANT (4): Where Xaa is D-Serine
  Description of Artificial Sequence:  Product of Synthesis and Cyclization based on Human OB-Cadherin
DDKXS

SEQ ID NO: 58 - protein, 4 aa, Artificial Sequence
  Description of Artificial Sequence:  Product of Synthesis and Cyclization based on Human OB-Cadherin
  Cyclic Peptide
WGGW

SEQ ID NO: 59 - protein, 6 aa, Unknown
  Description of Unknown Organism:  E-Cadherin Cell Adhesion Recognition Sequence
SHAVSS

SEQ ID NO: 60 - protein, 6 aa, Unknown
  Description of Unknown Organism:  N-Cadherin Cell Adhesion Recognition Sequence
AHAVDI

SEQ ID NO: 61 - protein, 15 aa, Unknown
  Description of Unknown Organism:  N-Cadherin Cell Adhesion Recognition Sequence
FHLRAHAVDINGNQV

SEQ ID NO: 62 - protein, 48 aa, Unknown
  Description of Unknown Organism:  Occludin Cell Adhesion Recognition Sequence
GVNPTAQSSGSLYGSQIYALCNQFYTPAATGLYVDQYLYHYCVVDPQE

SEQ ID NO: 63 - protein, 10 aa, Unknown
  Description of Unknown Organism:  N-CAM Cell Adhesion Recognition Sequence
KYSFNYDGSE

SEQ ID NO: 64 - protein, 10 aa, Artificial Sequence
  Description of Artificial Sequence:  Product of Synthesis based on Human Cadherin-5 Cell Adhesion Recognition Sequence
VFRVDAETGD

SEQ ID NO: 65 - protein, 4 aa, Unknown
  Description of Unknown Organism:  Calcium Binding Motifs in the Extracellular Domains of Nonclassical Cadherins
MDRE

SEQ ID NO: 66 - protein, 4 aa, Unknown
  Description of Unknown Organism:  Calcium Binding Motifs in the Extracellular Domains of Nonclassical Cadherins
LDFE

SEQ ID NO: 67 - protein, 4 aa, Unknown
  Description of Unknown Organism:  Calcium Binding Motifs in the Extracellular Domains of Nonclassical Cadherins
LDYE

SEQ ID NO: 68 - protein, 4 aa, Unknown
  Description of Unknown Organism:  Calcium Binding Motifs in the Extracellular Domains of Nonclassical Cadherins
IDRE

SEQ ID NO: 69 - protein, 4 aa, Unknown
  Description of Unknown Organism:  Calcium Binding Motifs in the Extracellular Domains of Nonclassical Cadherins
VDRE

SEQ ID NO: 70 - protein, 4 aa, Unknown
  Description of Unknown Organism:  Calcium Binding Motifs in the Extracellular Domains of Nonclassical Cadherins
IDFE

SEQ ID NO: 71 - protein, 5 aa, Artificial Sequence
  VARIANT (5): Where Xaa is beta,beta-dimethyl cysteine
  Cyclic Peptide
  Description of Artificial Sequence:  Product of Synthesis and Cyclization based on Human OB-cadherin
CDDKX

SEQ ID NO: 72 - protein, 11 aa, Unknown
  Description of Unknown Organism:  Calcium Binding Motifs in Extracellular Domains of Nonclassical Cadherins
  VARIANT (1): Where Xaa is any amino acid
  VARIANT (2): Where Xaa is any amino acid
  VARIANT (3): Where Xaa is any amino acid
  VARIANT (4): Where Xaa is any amino acid
  VARIANT (6): Where Xaa is any amino acid
  VARIANT (9): Where Xaa is any amino acid
  VARIANT (10): Where Xaa is any amino acid
XXXXDXNDXXP

SEQ ID NO: 73 - protein, 4 aa, Artificial Sequence
  Representative linear modulating agent based on OB-cadherin cell adhesion recognition sequence
DDKS

SEQ ID NO: 74 - protein, 5 aa, Artificial Sequence
  Representative linear modulating agent based on OB-cadherin cell adhesion recognition sequence
VIDDK

SEQ ID NO: 75 - protein, 5 aa, Artificial Sequence
  Representative linear modulating agent based on OB-cadherin cell adhesion recognition sequence
IDDKS

SEQ ID NO: 76 - protein, 6 aa, Artificial Sequence
  Representative linear modulating agent based on OB-cadherin cell adhesion recognition sequence
VIDDKS

SEQ ID NO: 77 - protein, 5 aa, Artificial Sequence
  Representative linear modulating agent based on OB-cadherin cell adhesion recognition sequence
DDKSG

SEQ ID NO: 78 - protein, 6 aa, Artificial Sequence
  Representative linear modulating agent based on OB-cadherin cell adhesion recognition sequence
IDDKSG

SEQ ID NO: 79 - protein, 7 aa, Artificial Sequence
  Representative linear modulating agent based on OB-cadherin cell adhesion recognition sequence
VIDDKSG

SEQ ID NO: 80 - protein, 6 aa, Artificial Sequence
  Representative linear modulating agent based on OB-cadherin cell adhesion recognition sequence
FVIDDK

SEQ ID NO: 81 - protein, 7 aa, Artificial Sequence
  Representative linear modulating agent based on OB-cadherin cell adhesion recognition sequence
FVIDDKS

SEQ ID NO: 82 - protein, 8 aa, Artificial Sequence
  Representative linear modulating agent based on OB-cadherin cell adhesion recognition sequence
FVIDDKSG

SEQ ID NO: 83 - protein, 7 aa, Artificial Sequence
  Representative linear modulating agent based on OB-cadherin cell adhesion recognition sequence
IFVIDDK

SEQ ID NO: 84 - protein, 8 aa, Artificial Sequence
  Representative linear modulating agent based on OB-cadherin cell adhesion recognition sequence
IFVIDDKS

SEQ ID NO: 85 - protein, 9 aa, Artificial Sequence
  Representative linear modulating agent based on OB-cadherin cell adhesion recognition sequence
IFVIDDKSG

SEQ ID NO: 86 - protein, 4 aa, Artificial Sequence
  Representative linear modulating agent based on OB-cadherin cell adhesion recognition sequence
IEEY

SEQ ID NO: 87 - protein, 4 aa, Artificial Sequence
  Representative linear modulating agent based on OB-cadherin cell adhesion recognition sequence
EEYT

SEQ ID NO: 88 - protein, 5 aa, Artificial Sequence
  Representative linear modulating agent based on OB-cadherin cell adhesion recognition sequence
VIEEY

SEQ ID NO: 89 - protein, 5 aa, Artificial Sequence
  Representative linear modulating agent based on OB-cadherin cell adhesion recognition sequence
IEEYT

SEQ ID NO: 90 - protein, 6 aa, Artificial Sequence
  Representative linear modulating agent based on OB-cadherin cell adhesion recognition sequence
VIEEYT

SEQ ID NO: 91 - protein, 5 aa, Artificial Sequence
  Representative linear modulating agent based on OB-cadherin cell adhesion recognition sequence
EEYTG

SEQ ID NO: 92 - protein, 6 aa, Artificial Sequence
  Representative linear modulating agent based on OB-cadherin cell adhesion recognition sequence
IEEYTG

SEQ ID NO: 93 - protein, 7 aa, Artificial Sequence
  Representative linear modulating agent based on OB-cadherin cell adhesion recognition sequence
VIEEYTG

SEQ ID NO: 94 - protein, 6 aa, Artificial Sequence
  Representative linear modulating agent based on OB-cadherin cell adhesion recognition sequence
FVIEEY

SEQ ID NO: 95 - protein, 7 aa, Artificial Sequence
  Representative linear modulating agent based on OB-cadherin cell adhesion recognition sequence
FVIEEYT

SEQ ID NO: 96 - protein, 8 aa, Artificial Sequence
  Representative linear modulating agent based on OB-cadherin cell adhesion recognition sequence
FVIEEYTG

SEQ ID NO: 97 - protein, 7 aa, Artificial Sequence
  Representative linear modulating agent based on OB-cadherin cell adhesion recognition sequence
FFVIEEY

SEQ ID NO: 98 - protein, 8 aa, Artificial Sequence
  Representative linear modulating agent based on OB-cadherin cell adhesion recognition sequence
FFVIEEYT

SEQ ID NO: 99 - protein, 9 aa, Artificial Sequence
  Representative linear modulating agent based on OB-cadherin cell adhesion recognition sequence
FFVIEEYTG

SEQ ID NO: 100 - protein, 4 aa, Artificial Sequence
  Representative linear modulating agent based on OB-cadherin cell adhesion recognition sequence
VEAQ

SEQ ID NO: 101 - protein, 4 aa, Artificial Sequence
  Representative linear modulating agent based on OB-cadherin cell adhesion recognition sequence
EAQT

SEQ ID NO: 102 - protein, 5 aa, Artificial Sequence
  Representative linear modulating agent based on OB-cadherin cell adhesion recognition sequence
SVEAQ

SEQ ID NO: 103 - protein, 5 aa, Artificial Sequence
  Representative linear modulating agent based on OB-cadherin cell adhesion recognition sequence
VEAQT

SEQ ID NO: 104 - protein, 6 aa, Artificial Sequence
  Representative linear modulating agent based on OB-cadherin cell adhesion recognition sequence
SVEAQT

SEQ ID NO: 105 - protein, 5 aa, Artificial Sequence
  Representative linear modulating agent based on OB-cadherin cell adhesion recognition sequence
EAQTG

SEQ ID NO: 106 - protein, 6 aa, Artificial Sequence
  Representative linear modulating agent based on OB-cadherin cell adhesion recognition sequence
VEAQTG

SEQ ID NO: 107 - protein, 7 aa, Artificial Sequence
  Representative linear modulating agent based on OB-cadherin cell adhesion recognition sequence
SVEAQTG

SEQ ID NO: 108 - protein, 6 aa, Artificial Sequence
  Representative linear modulating agent based on OB-cadherin cell adhesion recognition sequence
FSVEAQ

SEQ ID NO: 109 - protein, 7 aa, Artificial Sequence
  Representative linear modulating agent based on OB-cadherin cell adhesion recognition sequence
FSVEAQT

SEQ ID NO: 110 - protein, 8 aa, Artificial Sequence
  Representative linear modulating agent based on OB-cadherin cell adhesion recognition sequence
FSVEAQTG

SEQ ID NO: 111 - protein, 7 aa, Artificial Sequence
  Representative linear modulating agent based on OB-cadherin cell adhesion recognition sequence
YFSVEAQ

SEQ ID NO: 112 - protein, 8 aa, Artificial Sequence
  Representative linear modulating agent based on OB-cadherin cell adhesion recognition sequence
YFSVEAQT

SEQ ID NO: 113 - protein, 9 aa, Artificial Sequence
  Representative linear modulating agent based on OB-cadherin cell adhesion recognition sequence
YFSVEAQTG

SEQ ID NO: 114 - protein, 4 aa, Artificial Sequence
  Representative linear modulating agent based on cadherin-5 cell adhesion recognition sequence
VDAE

SEQ ID NO: 115 - protein, 4 aa, Artificial Sequence
  Representative linear modulating agent based on cadherin-5 cell adhesion recognition sequence
DAET

SEQ ID NO: 116 - protein, 5 aa, Artificial Sequence
  Representative linear modulating agent based on cadherin-5 cell adhesion recognition sequence
RVDAE

SEQ ID NO: 117 - protein, 5 aa, Artificial Sequence
  Representative linear modulating agent based on cadherin-5 cell adhesion recognition sequence
VDAET

SEQ ID NO: 118 - protein, 6 aa, Artificial Sequence
  Representative linear modulating agent based on cadherin-5 cell adhesion recognition sequence
RVDAET

SEQ ID NO: 119 - protein, 5 aa, Artificial Sequence
  Representative linear modulating agent based on cadherin-5 cell adhesion recognition sequence
DAETG

SEQ ID NO: 120 - protein, 6 aa, Artificial Sequence
  Representative linear modulating agent based on cadherin-5 cell adhesion recognition sequence
VDAETG

SEQ ID NO: 121 - protein, 7 aa, Artificial Sequence
  Representative linear modulating agent based on cadherin-5 cell adhesion recognition sequence
RVDAETG

SEQ ID NO: 122 - protein, 6 aa, Artificial Sequence
  Representative linear modulating agent based on cadherin-5 cell adhesion recognition sequence
FRVDAE

SEQ ID NO: 123 - protein, 7 aa, Artificial Sequence
  Representative linear modulating agent based on cadherin-5 cell adhesion recognition sequence
FRVDAET

SEQ ID NO: 124 - protein, 8 aa, Artificial Sequence
  Representative linear modulating agent based on cadherin-5 cell adhesion recognition sequence
FRVDAETG

SEQ ID NO: 125 - protein, 7 aa, Artificial Sequence
  Representative linear modulating agent based on cadherin-5 cell adhesion recognition sequence
VFRVDAE

SEQ ID NO: 126 - protein, 8 aa, Artificial Sequence
  Representative linear modulating agent based on cadherin-5 cell adhesion recognition sequence
VFRVDAET

SEQ ID NO: 127 - protein, 9 aa, Artificial Sequence
  Representative linear modulating agent based on cadherin-5 cell adhesion recognition sequence
VFRVDAETG

SEQ ID NO: 128 - protein, 4 aa, Artificial Sequence
  Representative linear modulating agent based on cadherin-6 cell adhesion recognition sequence
INEN

SEQ ID NO: 129 - protein, 4 aa, Artificial Sequence
  Representative linear modulating agent based on cadherin-6 cell adhesion recognition sequence
NENT

SEQ ID NO: 130 - protein, 5 aa, Artificial Sequence
  Representative linear modulating agent based on cadherin-6 cell adhesion recognition sequence
IINEN

SEQ ID NO: 131 - protein, 5 aa, Artificial Sequence
  Representative linear modulating agent based on cadherin-6 cell adhesion recognition sequence
INENT

SEQ ID NO: 132 - protein, 6 aa, Artificial Sequence
  Representative linear modulating agent based on cadherin-6 cell adhesion recognition sequence
IINENT

SEQ ID NO: 133 - protein, 5 aa, Artificial Sequence
  Representative linear modulating agent based on cadherin-6 cell adhesion recognition sequence
NENTG

SEQ ID NO: 134 - protein, 6 aa, Artificial Sequence
  Representative linear modulating agent based on cadherin-6 cell adhesion recognition sequence
INENTG

SEQ ID NO: 135 - protein, 7 aa, Artificial Sequence
  Representative linear modulating agent based on cadherin-6 cell adhesion recognition sequence
IINENTG

SEQ ID NO: 136 - protein, 6 aa, Artificial Sequence
  Representative linear modulating agent based on cadherin-6 cell adhesion recognition sequence
FIINEN

SEQ ID NO: 137 - protein, 7 aa, Artificial Sequence
  Representative linear modulating agent based on cadherin-6 cell adhesion recognition sequence
FIINENT

SEQ ID NO: 138 - protein, 8 aa, Artificial Sequence
  Representative linear modulating agent based on cadherin-6 cell adhesion recognition sequence
FIINENTG

SEQ ID NO: 139 - protein, 7 aa, Artificial Sequence
  Representative linear modulating agent based on cadherin-6 cell adhesion recognition sequence
LFIINEN

SEQ ID NO: 140 - protein, 8 aa, Artificial Sequence
  Representative linear modulating agent based on cadherin-6 cell adhesion recognition sequence
LFIINENT

SEQ ID NO: 141 - protein, 9 aa, Artificial Sequence
  Representative linear modulating agent based on cadherin-6 cell adhesion recognition sequence
LFIINENTG

SEQ ID NO: 142 - protein, 4 aa, Artificial Sequence
  Representative linear modulating agent based on cadherin-6 cell adhesion recognition sequence
EEYT

SEQ ID NO: 143 - protein, 5 aa, Artificial Sequence
  Representative linear modulating agent based on cadherin-6 cell adhesion recognition sequence
EEYTG

SEQ ID NO: 144 - protein, 4 aa, Artificial Sequence
  Representative linear modulating agent based on cadherin-6 cell adhesion recognition sequence
LEEY

SEQ ID NO: 145 - protein, 5 aa, Artificial Sequence
  Representative linear modulating agent based on cadherin-6 cell adhesion recognition sequence
LEEYT

SEQ ID NO: 146 - protein, 6 aa, Artificial Sequence
  Representative linear modulating agent based on cadherin-6 cell adhesion recognition sequence
LEEYTG

SEQ ID NO: 147 - protein, 5 aa, Artificial Sequence
  Representative linear modulating agent based on cadherin-6 cell adhesion recognition sequence
LLEEY

SEQ ID NO: 148 - protein, 7 aa, Artificial Sequence
  Representative linear modulating agent based on cadherin-6 cell adhesion recognition sequence
LLEEYTG

SEQ ID NO: 149 - protein, 6 aa, Artificial Sequence
  Representative linear modulating agent based on cadherin-6 cell adhesion recognition sequence
FLLEEY

SEQ ID NO: 150 - protein, 7 aa, Artificial Sequence
  Representative linear modulating agent based on cadherin-6 cell adhesion recognition sequence
FLLEEYT

SEQ ID NO: 151 - protein, 8 aa, Artificial Sequence
  Representative linear modulating agent based on cadherin-6 cell adhesion recognition sequence
FLLEEYTG

SEQ ID NO: 152 - protein, 7 aa, Artificial Sequence
  Representative linear modulating agent based on cadherin-6 cell adhesion recognition sequence
FFLLEEY

SEQ ID NO: 153 - protein, 8 aa, Artificial Sequence
  Representative linear modulating agent based on cadherin-6 cell adhesion recognition sequence
FFLLEEYT

SEQ ID NO: 154 - protein, 9 aa, Artificial Sequence
  Representative linear modulating agent based on cadherin-6 cell adhesion recognition sequence
FFLLEEYTG

SEQ ID NO: 155 - protein, 4 aa, Artificial Sequence
  Representative linear modulating agent based on cadherin-6 cell adhesion recognition sequence
ESET

SEQ ID NO: 156 - protein, 5 aa, Artificial Sequence
  Representative linear modulating agent based on cadherin-6 cell adhesion recognition sequence
ESETG

SEQ ID NO: 157 - protein, 4 aa, Artificial Sequence
  Representative linear modulating agent based on cadherin-6 cell adhesion recognition sequence
VESE

SEQ ID NO: 158 - protein, 5 aa, Artificial Sequence
  Representative linear modulating agent based on cadherin-6 cell adhesion recognition sequence
VSEST

SEQ ID NO: 159 - protein, 6 aa, Artificial Sequence
  Representative linear modulating agent based on cadherin-6 cell adhesion recognition sequence
VESETG

SEQ ID NO: 160 - protein, 5 aa, Artificial Sequence
  Representative linear modulating agent based on cadherin-6 cell adhesion recognition sequence
SVESE

SEQ ID NO: 161 - protein, 6 aa, Artificial Sequence
  Representative linear modulating agent based on cadherin-6 cell adhesion recognition sequence
SVESET

SEQ ID NO: 162 - protein, 7 aa, Artificial Sequence
  Representative linear modulating agent based on cadherin-6 cell adhesion recognition sequence
SVESETG

SEQ ID NO: 163 - protein, 6 aa, Artificial Sequence
  Representative linear modulating agent based on cadherin-6 cell adhesion recognition sequence
FSVESE

SEQ ID NO: 164 - protein, 7 aa, Artificial Sequence
  Representative linear modulating agent based on cadherin-6 cell adhesion recognition sequence
FSVESET

SEQ ID NO: 165 - protein, 8 aa, Artificial Sequence
  Representative linear modulating agent based on cadherin-6 cell adhesion recognition sequence
FSVESETG

SEQ ID NO: 166 - protein, 7 aa, Artificial Sequence
  Representative linear modulating agent based on cadherin-6 cell adhesion recognition sequence
YFSVESE

SEQ ID NO: 167 - protein, 8 aa, Artificial Sequence
  Representative linear modulating agent based on cadherin-6 cell adhesion recognition sequence
YFSVESET

SEQ ID NO: 168 - protein, 9 aa, Artificial Sequence
  Representative linear modulating agent based on cadherin-6 cell adhesion recognition sequence
YFSVESETG

SEQ ID NO: 169 - protein, 4 aa, Artificial Sequence
  Representative linear modulating agent based on cadherin-6 cell adhesion recognition sequence
DSGN

SEQ ID NO: 170 - protein, 5 aa, Artificial Sequence
  Representative linear modulating agent based on cadherin-6 cell adhesion recognition sequence
DSGNG

SEQ ID NO: 171 - protein, 4 aa, Artificial Sequence
  Representative linear modulating agent based on cadherin-6 cell adhesion recognition sequence
IDSG

SEQ ID NO: 172 - protein, 5 aa, Artificial Sequence
  Representative linear modulating agent based on cadherin-6 cell adhesion recognition sequence
IDSGN

SEQ ID NO: 173 - protein, 6 aa, Artificial Sequence
  Representative linear modulating agent based on cadherin-6 cell adhesion recognition sequence
IDSGNG

SEQ ID NO: 174 - protein, 5 aa, Artificial Sequence
  Representative linear modulating agent based on cadherin-6 cell adhesion recognition sequence
NIDSG

SEQ ID NO: 175 - protein, 6 aa, Artificial Sequence
  Representative linear modulating agent based on cadherin-6 cell adhesion recognition sequence
NIDSGN

SEQ ID NO: 176 - protein, 7 aa, Artificial Sequence
  Representative linear modulating agent based on cadherin-6 cell adhesion recognition sequence
NIDSGNG

SEQ ID NO: 177 - protein, 6 aa, Artificial Sequence
  Representative linear modulating agent based on cadherin-6 cell adhesion recognition sequence
FNIDSG

SEQ ID NO: 178 - protein, 7 aa, Artificial Sequence
  Representative linear modulating agent based on cadherin-6 cell adhesion recognition sequence
FNIDSGN

SEQ ID NO: 179 - protein, 8 aa, Artificial Sequence
  Representative linear modulating agent based on cadherin-6 cell adhesion recognition sequence
FNIDSGNG

SEQ ID NO: 180 - protein, 7 aa, Artificial Sequence
  Representative linear modulating agent based on cadherin-6 cell adhesion recognition sequence
IFNIDSG

SEQ ID NO: 181 - protein, 8 aa, Artificial Sequence
  Representative linear modulating agent based on cadherin-6 cell adhesion recognition sequence
IFNIDSGN

SEQ ID NO: 182 - protein, 9 aa, Artificial Sequence
  Representative linear modulating agent based on cadherin-6 cell adhesion recognition sequence
IFNIDSGNG

SEQ ID NO: 183 - protein, 4 aa, Artificial Sequence
  Representative linear modulating agent based on cadherin-7 cell adhesion recognition sequence
IDEN

SEQ ID NO: 184 - protein, 4 aa, Artificial Sequence
  Representative linear modulating agent based on cadherin-7 cell adhesion recognition sequence
DENT

SEQ ID NO: 185 - protein, 5 aa, Artificial Sequence
  Representative linear modulating agent based on cadherin-7 cell adhesion recognition sequence
IIDEN

SEQ ID NO: 186 - protein, 5 aa, Artificial Sequence
  Representative linear modulating agent based on cadherin-7 cell adhesion recognition sequence
IDENT

SEQ ID NO: 187 - protein, 6 aa, Artificial Sequence
  Representative linear modulating agent based on cadherin-7 cell adhesion recognition sequence
IIDENT

SEQ ID NO: 188 - protein, 5 aa, Artificial Sequence
  Representative linear modulating agent based on cadherin-7 cell adhesion recognition sequence
DENTG

SEQ ID NO: 189 - protein, 6 aa, Artificial Sequence
  Representative linear modulating agent based on cadherin-7 cell adhesion recognition sequence
IDENTG

SEQ ID NO: 190 - protein, 7 aa, Artificial Sequence
  Representative linear modulating agent based on cadherin-7 cell adhesion recognition sequence
IIDENTG

SEQ ID NO: 191 - protein, 6 aa, Artificial Sequence
  Representative linear modulating agent based on cadherin-7 cell adhesion recognition sequence
FIIDEN

SEQ ID NO: 192 - protein, 7 aa, Artificial Sequence
  Representative linear modulating agent based on cadherin-7 cell adhesion recognition sequence
FIIDENT

SEQ ID NO: 193 - protein, 8 aa, Artificial Sequence
  Representative linear modulating agent based on cadherin-7 cell adhesion recognition sequence
FIIDENTG

SEQ ID NO: 194 - protein, 7 aa, Artificial Sequence
  Representative linear modulating agent based on cadherin-7 cell adhesion recognition sequence
IFIIDEN

SEQ ID NO: 195 - protein, 8 aa, Artificial Sequence
  Representative linear modulating agent based on cadherin-7 cell adhesion recognition sequence
IFIIDENT

SEQ ID NO: 196 - protein, 9 aa, Artificial Sequence
  Representative linear modulating agent based on cadherin-7 cell adhesion recognition sequence
IFIIDENTG

SEQ ID NO: 197 - protein, 4 aa, Artificial Sequence
  Representative linear modulating agent based on cadherin-7 cell adhesion recognition sequence
EPKT

SEQ ID NO: 198 - protein, 5 aa, Artificial Sequence
  Representative linear modulating agent based on cadherin-7 cell adhesion recognition sequence
EPKTG

SEQ ID NO: 199 - protein, 4 aa, Artificial Sequence
  Representative linear modulating agent based on cadherin-7 cell adhesion recognition sequence
VEPK

SEQ ID NO: 200 - protein, 5 aa, Artificial Sequence
  Representative linear modulating agent based on cadherin-7 cell adhesion recognition sequence
VEPKT

SEQ ID NO: 201 - protein, 6 aa, Artificial Sequence
  Representative linear modulating agent based on cadherin-7 cell adhesion recognition sequence
VEPKTG

SEQ ID NO: 202 - protein, 5 aa, Artificial Sequence
  Representative linear modulating agent based on cadherin-7 cell adhesion recognition sequence
SVEPK

SEQ ID NO: 203 - protein, 6 aa, Artificial Sequence
  Representative linear modulating agent based on cadherin-7 cell adhesion recognition sequence
SVEPKT

SEQ ID NO: 204 - protein, 7 aa, Artificial Sequence
  Representative linear modulating agent based on cadherin-7 cell adhesion recognition sequence
SVEPKTG

SEQ ID NO: 205 - protein, 6 aa, Artificial Sequence
  Representative linear modulating agent based on cadherin-7 cell adhesion recognition sequence
FSVEPK

SEQ ID NO: 206 - protein, 7 aa, Artificial Sequence
  Representative linear modulating agent based on cadherin-7 cell adhesion recognition sequence
FSVEPKT

SEQ ID NO: 207 - protein, 8 aa, Artificial Sequence
  Representative linear modulating agent based on cadherin-7 cell adhesion recognition sequence
FSVEPKTG

SEQ ID NO: 208 - protein, 7 aa, Artificial Sequence
  Representative linear modulating agent based on cadherin-7 cell adhesion recognition sequence
YFSVEPK

SEQ ID NO: 209 - protein, 8 aa, Artificial Sequence
  Representative linear modulating agent based on cadherin-7 cell adhesion recognition sequence
YFSVEPKT

SEQ ID NO: 210 - protein, 9 aa, Artificial Sequence
  Representative linear modulating agent based on cadherin-7 cell adhesion recognition sequence
YFSVEPKTG

SEQ ID NO: 211 - protein, 4 aa, Artificial Sequence
  Representative linear modulating agent based on cadherin-7 cell adhesion recognition sequence
DANS

SEQ ID NO: 212 - protein, 5 aa, Artificial Sequence
  Representative linear modulating agent based on cadherin-7 cell adhesion recognition sequence
DANSG

SEQ ID NO: 213 - protein, 4 aa, Artificial Sequence
  Representative linear modulating agent based on cadherin-7 cell adhesion recognition sequence
IDAN

SEQ ID NO: 214 - protein, 5 aa, Artificial Sequence
  Representative linear modulating agent based on cadherin-7 cell adhesion recognition sequence
IDANS

SEQ ID NO: 215 - protein, 6 aa, Artificial Sequence
  Representative linear modulating agent based on cadherin-7 cell adhesion recognition sequence
IDANSG

SEQ ID NO: 216 - protein, 5 aa, Artificial Sequence
  Representative linear modulating agent based on cadherin-7 cell adhesion recognition sequence
NIDAN

SEQ ID NO: 217 - protein, 6 aa, Artificial Sequence
  Representative linear modulating agent based on cadherin-7 cell adhesion recognition sequence
NIDANS

SEQ ID NO: 218 - protein, 7 aa, Artificial Sequence
  Representative linear modulating agent based on cadherin-7 cell adhesion recognition sequence
NIDANSG

SEQ ID NO: 219 - protein, 6 aa, Artificial Sequence
  Representative linear modulating agent based on cadherin-7 cell adhesion recognition sequence
FNIDAN

SEQ ID NO: 220 - protein, 7 aa, Artificial Sequence
  Representative linear modulating agent based on cadherin-7 cell adhesion recognition sequence
FNIDANS

SEQ ID NO: 221 - protein, 8 aa, Artificial Sequence
  Representative linear modulating agent based on cadherin-7 cell adhesion recognition sequence
FNIDANSG

SEQ ID NO: 222 - protein, 7 aa, Artificial Sequence
  Representative linear modulating agent based on cadherin-7 cell adhesion recognition sequence
YFNIDAN

SEQ ID NO: 223 - protein, 8 aa, Artificial Sequence
  Representative linear modulating agent based on cadherin-7 cell adhesion recognition sequence
YFNIDANS

SEQ ID NO: 224 - protein, 9 aa, Artificial Sequence
  Representative linear modulating agent based on cadherin-7 cell adhesion recognition sequence
YFNIDANSG

SEQ ID NO: 225 - protein, 4 aa, Artificial Sequence
  Representative linear modulating agent based on cadherin-8 cell adhesion recognition sequence
INDV

SEQ ID NO: 226 - protein, 4 aa, Artificial Sequence
  Representative linear modulating agent based on cadherin-8 cell adhesion recognition sequence
NDVT

SEQ ID NO: 227 - protein, 5 aa, Artificial Sequence
  Representative linear modulating agent based on cadherin-8 cell adhesion recognition sequence
QINDV

SEQ ID NO: 228 - protein, 5 aa, Artificial Sequence
  Representative linear modulating agent based on cadherin-8 cell adhesion recognition sequence
INDVT

SEQ ID NO: 229 - protein, 6 aa, Artificial Sequence
  Representative linear modulating agent based on cadherin-8 cell adhesion recognition sequence
QINDVT

SEQ ID NO: 230 - protein, 5 aa, Artificial Sequence
  Representative linear modulating agent based on cadherin-8 cell adhesion recognition sequence
NDVTG

SEQ ID NO: 231 - protein, 6 aa, Artificial Sequence
  Representative linear modulating agent based on cadherin-8 cell adhesion recognition sequence
INDVTG

SEQ ID NO: 232 - protein, 7 aa, Artificial Sequence
  Representative linear modulating agent based on cadherin-8 cell adhesion recognition sequence
QINDVTG

SEQ ID NO: 233 - protein, 6 aa, Artificial Sequence
  Representative linear modulating agent based on cadherin-8 cell adhesion recognition sequence
FQINDV

SEQ ID NO: 234 - protein, 7 aa, Artificial Sequence
  Representative linear modulating agent based on cadherin-8 cell adhesion recognition sequence
FQINDVT

SEQ ID NO: 235 - protein, 8 aa, Artificial Sequence
  Representative linear modulating agent based on cadherin-8 cell adhesion recognition sequence
FQINDVTG

SEQ ID NO: 236 - protein, 7 aa, Artificial Sequence
  Representative linear modulating agent based on cadherin-8 cell adhesion recognition sequence
IFQINDV

SEQ ID NO: 237 - protein, 8 aa, Artificial Sequence
  Representative linear modulating agent based on cadherin-8 cell adhesion recognition sequence
IFQINDVT

SEQ ID NO: 238 - protein, 9 aa, Artificial Sequence
  Representative linear modulating agent based on cadherin-8 cell adhesion recognition sequence
IFQINDVTG

SEQ ID NO: 239 - protein, 4 aa, Artificial Sequence
  Representative linear modulating agent based on cadherin-8 cell adhesion recognition sequence
EEFS

SEQ ID NO: 240 - protein, 5 aa, Artificial Sequence
  Representative linear modulating agent based on cadherin-8 cell adhesion recognition sequence
EEFSG

SEQ ID NO: 241 - protein, 4 aa, Artificial Sequence
  Representative linear modulating agent based on cadherin-8 cell adhesion recognition sequence
LEEF

SEQ ID NO: 242 - protein, 5 aa, Artificial Sequence
  Representative linear modulating agent based on cadherin-8 cell adhesion recognition sequence
LEEFS

SEQ ID NO: 243 - protein, 6 aa, Artificial Sequence
  Representative linear modulating agent based on cadherin-8 cell adhesion recognition sequence
LEEFSG

SEQ ID NO: 244 - protein, 5 aa, Artificial Sequence
  Representative linear modulating agent based on cadherin-8 cell adhesion recognition sequence
VLEEF

SEQ ID NO: 245 - protein, 6 aa, Artificial Sequence
  Representative linear modulating agent based on cadherin-8 cell adhesion recognition sequence
VLEEFS

SEQ ID NO: 246 - protein, 7 aa, Artificial Sequence
  Representative linear modulating agent based on cadherin-8 cell adhesion recognition sequence
VLEEFSG

SEQ ID NO: 247 - protein, 6 aa, Artificial Sequence
  Representative linear modulating agent based on cadherin-8 cell adhesion recognition sequence
FVLEEF

SEQ ID NO: 248 - protein, 7 aa, Artificial Sequence
  Representative linear modulating agent based on cadherin-8 cell adhesion recognition sequence
FVLEEFS

SEQ ID NO: 249 - protein, 8 aa, Artificial Sequence
  Representative linear modulating agent based on cadherin-8 cell adhesion recognition sequence
FVLEEFSG

SEQ ID NO: 250 - protein, 7 aa, Artificial Sequence
  Representative linear modulating agent based on cadherin-8 cell adhesion recognition sequence
MFVLEEF

SEQ ID NO: 251 - protein, 8 aa, Artificial Sequence
  Representative linear modulating agent based on cadherin-8 cell adhesion recognition sequence
MFVLEEFS

SEQ ID NO: 252 - protein, 9 aa, Artificial Sequence
  Representative linear modulating agent based on cadherin-8 cell adhesion recognition sequence
MFVLEEFSG

SEQ ID NO: 253 - protein, 4 aa, Artificial Sequence
  Representative linear modulating agent based on cadherin-12 cell adhesion recognition sequence
IDET

SEQ ID NO: 254 - protein, 4 aa, Artificial Sequence
  Representative linear modulating agent based on cadherin-12 cell adhesion recognition sequence
DETT

SEQ ID NO: 255 - protein, 5 aa, Artificial Sequence
  Representative linear modulating agent based on cadherin-12 cell adhesion recognition sequence
TIDET

SEQ ID NO: 256 - protein, 5 aa, Artificial Sequence
  Representative linear modulating agent based on cadherin-12 cell adhesion recognition sequence
IDETT

SEQ ID NO: 257 - protein, 6 aa, Artificial Sequence
  Representative linear modulating agent based on cadherin-12 cell adhesion recognition sequence
TIDETT

SEQ ID NO: 258 - protein, 5 aa, Artificial Sequence
  Representative linear modulating agent based on cadherin-12 cell adhesion recognition sequence
DETTG

SEQ ID NO: 259 - protein, 6 aa, Artificial Sequence
  Representative linear modulating agent based on cadherin-12 cell adhesion recognition sequence
IDETTG

SEQ ID NO: 260 - protein, 7 aa, Artificial Sequence
  Representative linear modulating agent based on cadherin-12 cell adhesion recognition sequence
TIDETTG

SEQ ID NO: 261 - protein, 6 aa, Artificial Sequence
  Representative linear modulating agent based on cadherin-12 cell adhesion recognition sequence
FTIDET

SEQ ID NO: 262 - protein, 7 aa, Artificial Sequence
  Representative linear modulating agent based on cadherin-12 cell adhesion recognition sequence
FTIDETT

SEQ ID NO: 263 - protein, 8 aa, Artificial Sequence
  Representative linear modulating agent based on cadherin-12 cell adhesion recognition sequence
FTIDETTG

SEQ ID NO: 264 - protein, 7 aa, Artificial Sequence
  Representative linear modulating agent based on cadherin-12 cell adhesion recognition sequence
VFTIDET

SEQ ID NO: 265 - protein, 8 aa, Artificial Sequence
  Representative linear modulating agent based on cadherin-12 cell adhesion recognition sequence
VFTIDETT

SEQ ID NO: 266 - protein, 9 aa, Artificial Sequence
  Representative linear modulating agent based on cadherin-12 cell adhesion recognition sequence
VFTIDETTG

SEQ ID NO: 267 - protein, 4 aa, Artificial Sequence
  Representative linear modulating agent based on cadherin-12 cell adhesion recognition sequence
DPKT

SEQ ID NO: 268 - protein, 5 aa, Artificial Sequence
  Representative linear modulating agent based on cadherin-12 cell adhesion recognition sequence
DPKTG

SEQ ID NO: 269 - protein, 4 aa, Artificial Sequence
  Representative linear modulating agent based on cadherin-12 cell adhesion recognition sequence
IDPK

SEQ ID NO: 270 - protein, 5 aa, Artificial Sequence
  Representative linear modulating agent based on cadherin-12 cell adhesion recognition sequence
IDPKT

SEQ ID NO: 271 - protein, 6 aa, Artificial Sequence
  Representative linear modulating agent based on cadherin-12 cell adhesion recognition sequence
IDPKTG

SEQ ID NO: 272 - protein, 5 aa, Artificial Sequence
  Representative linear modulating agent based on cadherin-12 cell adhesion recognition sequence
SIDPK

SEQ ID NO: 273 - protein, 6 aa, Artificial Sequence
  Representative linear modulating agent based on cadherin-12 cell adhesion recognition sequence
SIDPKT

SEQ ID NO: 274 - protein, 7 aa, Artificial Sequence
  Representative linear modulating agent based on cadherin-12 cell adhesion recognition sequence
SIDPKTG

SEQ ID NO: 275 - protein, 6 aa, Artificial Sequence
  Representative linear modulating agent based on cadherin-12 cell adhesion recognition sequence
FSIDPK

SEQ ID NO: 276 - protein, 7 aa, Artificial Sequence
  Representative linear modulating agent based on cadherin-12 cell adhesion recognition sequence
FSIDPKT

SEQ ID NO: 277 - protein, 8 aa, Artificial Sequence
  Representative linear modulating agent based on cadherin-12 cell adhesion recognition sequence
FSIDPKTG

SEQ ID NO: 278 - protein, 7 aa, Artificial Sequence
  Representative linear modulating agent based on cadherin-12 cell adhesion recognition sequence
YFSIDPK

SEQ ID NO: 279 - protein, 8 aa, Artificial Sequence
  Representative linear modulating agent based on cadherin-12 cell adhesion recognition sequence
YFSIDPKT

SEQ ID NO: 280 - protein, 9 aa, Artificial Sequence
  Representative linear modulating agent based on cadherin-12 cell adhesion recognition sequence
YFSIDPKTG

SEQ ID NO: 281 - protein, 4 aa, Artificial Sequence
  Representative linear modulating agent based on cadherin-14 cell adhesion recognition sequence
IDDT

SEQ ID NO: 282 - protein, 4 aa, Artificial Sequence
  Representative linear modulating agent based on cadherin-14 cell adhesion recognition sequence
DDTT

SEQ ID NO: 283 - protein, 5 aa, Artificial Sequence
  Representative linear modulating agent based on cadherin-14 cell adhesion recognition sequence
IIDDT

SEQ ID NO: 284 - protein, 5 aa, Artificial Sequence
  Representative linear modulating agent based on cadherin-14 cell adhesion recognition sequence
IDDTT

SEQ ID NO: 285 - protein, 6 aa, Artificial Sequence
  Representative linear modulating agent based on cadherin-14 cell adhesion recognition sequence
IIDDTT

SEQ ID NO: 286 - protein, 5 aa, Artificial Sequence
  Representative linear modulating agent based on cadherin-14 cell adhesion recognition sequence
DDTTG

SEQ ID NO: 287 - protein, 6 aa, Artificial Sequence
  Representative linear modulating agent based on cadherin-14 cell adhesion recognition sequence
IDDTTG

SEQ ID NO: 288 - protein, 7 aa, Artificial Sequence
  Representative linear modulating agent based on cadherin-14 cell adhesion recognition sequence
IIDDTTG

SEQ ID NO: 289 - protein, 6 aa, Artificial Sequence
  Representative linear modulating agent based on cadherin-14 cell adhesion recognition sequence
FIIDDT

SEQ ID NO: 290 - protein, 7 aa, Artificial Sequence
  Representative linear modulating agent based on cadherin-14 cell adhesion recognition sequence
FIIDDTT

SEQ ID NO: 291 - protein, 8 aa, Artificial Sequence
  Representative linear modulating agent based on cadherin-14 cell adhesion recognition sequence
FIIDDTTG

SEQ ID NO: 292 - protein, 7 aa, Artificial Sequence
  Representative linear modulating agent based on cadherin-14 cell adhesion recognition sequence
IFIIDDT

SEQ ID NO: 293 - protein, 8 aa, Artificial Sequence
  Representative linear modulating agent based on cadherin-14 cell adhesion recognition sequence
IFIIDDTT

SEQ ID NO: 294 - protein, 9 aa, Artificial Sequence
  Representative linear modulating agent based on cadherin-14 cell adhesion recognition sequence
IFIIDDTTG

SEQ ID NO: 295 - protein, 4 aa, Artificial Sequence
  Representative linear modulating agent based on cadherin-14 cell adhesion recognition sequence
DPKT

SEQ ID NO: 296 - protein, 5 aa, Artificial Sequence
  Representative linear modulating agent based on cadherin-14 cell adhesion recognition sequence
DPKTG

SEQ ID NO: 297 - protein, 4 aa, Artificial Sequence
  Representative linear modulating agent based on cadherin-14 cell adhesion recognition sequence
VDPK

SEQ ID NO: 298 - protein, 5 aa, Artificial Sequence
  Representative linear modulating agent based on cadherin-14 cell adhesion recognition sequence
VDPKT

SEQ ID NO: 299 - protein, 6 aa, Artificial Sequence
  Representative linear modulating agent based on cadherin-14 cell adhesion recognition sequence
VDPKTG

SEQ ID NO: 300 - protein, 5 aa, Artificial Sequence
  Representative linear modulating agent based on cadherin-14 cell adhesion recognition sequence
SVDPK

SEQ ID NO: 301 - protein, 6 aa, Artificial Sequence
  Representative linear modulating agent based on cadherin-14 cell adhesion recognition sequence
SVDPKT

SEQ ID NO: 302 - protein, 7 aa, Artificial Sequence
  Representative linear modulating agent based on cadherin-14 cell adhesion recognition sequence
SVDPKTG

SEQ ID NO: 303 - protein, 6 aa, Artificial Sequence
  Representative linear modulating agent based on cadherin-14 cell adhesion recognition sequence
FSVDPK

SEQ ID NO: 304 - protein, 7 aa, Artificial Sequence
  Representative linear modulating agent based on cadherin-14 cell adhesion recognition sequence
FSVDPKT

SEQ ID NO: 305 - protein, 8 aa, Artificial Sequence
  Representative linear modulating agent based on cadherin-14 cell adhesion recognition sequence
FSVDPKTG

SEQ ID NO: 306 - protein, 7 aa, Artificial Sequence
  Representative linear modulating agent based on cadherin-14 cell adhesion recognition sequence
YFSVDPK

SEQ ID NO: 307 - protein, 8 aa, Artificial Sequence
  Representative linear modulating agent based on cadherin-14 cell adhesion recognition sequence
YFSVDPKT

SEQ ID NO: 308 - protein, 9 aa, Artificial Sequence
  Representative linear modulating agent based on cadherin-14 cell adhesion recognition sequence
YFSVDPKTG

SEQ ID NO: 309 - protein, 4 aa, Artificial Sequence
  Representative linear modulating agent based on cadherin-14 cell adhesion recognition sequence
DANT

SEQ ID NO: 310 - protein, 5 aa, Artificial Sequence
  Representative linear modulating agent based on cadherin-14 cell adhesion recognition sequence
DANTG

SEQ ID NO: 311 - protein, 5 aa, Artificial Sequence
  Representative linear modulating agent based on cadherin-14 cell adhesion recognition sequence
IDANT

SEQ ID NO: 312 - protein, 6 aa, Artificial Sequence
  Representative linear modulating agent based on cadherin-14 cell adhesion recognition sequence
IDANTG

SEQ ID NO: 313 - protein, 6 aa, Artificial Sequence
  Representative linear modulating agent based on cadherin-14 cell adhesion recognition sequence
NIDANT

SEQ ID NO: 314 - protein, 7 aa, Artificial Sequence
  Representative linear modulating agent based on cadherin-14 cell adhesion recognition sequence
NIDANTG

SEQ ID NO: 315 - protein, 7 aa, Artificial Sequence
  Representative linear modulating agent based on cadherin-14 cell adhesion recognition sequence
FNIDANT

SEQ ID NO: 316 - protein, 8 aa, Artificial Sequence
  Representative linear modulating agent based on cadherin-14 cell adhesion recognition sequence
FNIDANTG

SEQ ID NO: 317 - protein, 7 aa, Artificial Sequence
  Representative linear modulating agent based on cadherin-14 cell adhesion recognition sequence
FFNIDAN

SEQ ID NO: 318 - protein, 8 aa, Artificial Sequence
  Representative linear modulating agent based on cadherin-14 cell adhesion recognition sequence
FFNIDANT

SEQ ID NO: 319 - protein, 9 aa, Artificial Sequence
  Representative linear modulating agent based on cadherin-14 cell adhesion recognition sequence
FFNIDANTG

SEQ ID NO: 320 - protein, 4 aa, Artificial Sequence
  Representative linear modulating agent based on cadherin-15 cell adhesion recognition sequence
IDKF

SEQ ID NO: 321 - protein, 4 aa, Artificial Sequence
  Representative linear modulating agent based on cadherin-15 cell adhesion recognition sequence
DKFT

SEQ ID NO: 322 - protein, 5 aa, Artificial Sequence
  Representative linear modulating agent based on cadherin-15 cell adhesion recognition sequence
SIDKF

SEQ ID NO: 323 - protein, 5 aa, Artificial Sequence
  Representative linear modulating agent based on cadherin-15 cell adhesion recognition sequence
IDKFT

SEQ ID NO: 324 - protein, 6 aa, Artificial Sequence
  Representative linear modulating agent based on cadherin-15 cell adhesion recognition sequence
SIDKFT

SEQ ID NO: 325 - protein, 5 aa, Artificial Sequence
  Representative linear modulating agent based on cadherin-15 cell adhesion recognition sequence
DKFTG

SEQ ID NO: 326 - protein, 6 aa, Artificial Sequence
  Representative linear modulating agent based on cadherin-15 cell adhesion recognition sequence
IDKFTG

SEQ ID NO: 327 - protein, 7 aa, Artificial Sequence
  Representative linear modulating agent based on cadherin-15 cell adhesion recognition sequence
SIDKFTG

SEQ ID NO: 328 - protein, 6 aa, Artificial Sequence
  Representative linear modulating agent based on cadherin-15 cell adhesion recognition sequence
FSIDKF

SEQ ID NO: 329 - protein, 7 aa, Artificial Sequence
  Representative linear modulating agent based on cadherin-15 cell adhesion recognition sequence
FSIDKFT

SEQ ID NO: 330 - protein, 8 aa, Artificial Sequence
  Representative linear modulating agent based on cadherin-15 cell adhesion recognition sequence
FSIDKFTG

SEQ ID NO: 331 - protein, 7 aa, Artificial Sequence
  Representative linear modulating agent based on cadherin-15 cell adhesion recognition sequence
VFSIDKF

SEQ ID NO: 332 - protein, 8 aa, Artificial Sequence
  Representative linear modulating agent based on cadherin-15 cell adhesion recognition sequence
VFSIDKFT

SEQ ID NO: 333 - protein, 9 aa, Artificial Sequence
  Representative linear modulating agent based on cadherin-15 cell adhesion recognition sequence
VFSIDKFTG

SEQ ID NO: 334 - protein, 4 aa, Artificial Sequence
  Representative linear modulating agent based on cadherin-15 cell adhesion recognition sequence
DELT

SEQ ID NO: 335 - protein, 5 aa, Artificial Sequence
  Representative linear modulating agent based on cadherin-15 cell adhesion recognition sequence
DELTG

SEQ ID NO: 336 - protein, 4 aa, Artificial Sequence
  Representative linear modulating agent based on cadherin-15 cell adhesion recognition sequence
IDEL

SEQ ID NO: 337 - protein, 5 aa, Artificial Sequence
  Representative linear modulating agent based on cadherin-15 cell adhesion recognition sequence
IDELT

SEQ ID NO: 338 - protein, 6 aa, Artificial Sequence
  Representative linear modulating agent based on cadherin-15 cell adhesion recognition sequence
IDELTG

SEQ ID NO: 339 - protein, 5 aa, Artificial Sequence
  Representative linear modulating agent based on cadherin-15 cell adhesion recognition sequence
SIDEL

SEQ ID NO: 340 - protein, 6 aa, Artificial Sequence
  Representative linear modulating agent based on cadherin-15 cell adhesion recognition sequence
SIDELT

SEQ ID NO: 341 - protein, 7 aa, Artificial Sequence
  Representative linear modulating agent based on cadherin-15 cell adhesion recognition sequence
SIDELTG

SEQ ID NO: 342 - protein, 6 aa, Artificial Sequence
  Representative linear modulating agent based on cadherin-15 cell adhesion recognition sequence
FSIDEL

SEQ ID NO: 343 - protein, 7 aa, Artificial Sequence
  Representative linear modulating agent based on cadherin-15 cell adhesion recognition sequence
FSIDELT

SEQ ID NO: 344 - protein, 8 aa, Artificial Sequence
  Representative linear modulating agent based on cadherin-15 cell adhesion recognition sequence
FSIDELTG

SEQ ID NO: 345 - protein, 7 aa, Artificial Sequence
  Representative linear modulating agent based on cadherin-15 cell adhesion recognition sequence
LFSIDEL

SEQ ID NO: 346 - protein, 8 aa, Artificial Sequence
  Representative linear modulating agent based on cadherin-15 cell adhesion recognition sequence
LFSIDELT

SEQ ID NO: 347 - protein, 9 aa, Artificial Sequence
  Representative linear modulating agent based on cadherin-15 cell adhesion recognition sequence
LFSIDELTG

SEQ ID NO: 348 - protein, 4 aa, Artificial Sequence
  Representative linear modulating agent based on T-cadherin cell adhesion recognition sequence
INEN

SEQ ID NO: 349 - protein, 4 aa, Artificial Sequence
  Representative linear modulating agent based on T-cadherin cell adhesion recognition sequence
NENT

SEQ ID NO: 350 - protein, 5 aa, Artificial Sequence
  Representative linear modulating agent based on T-cadherin cell adhesion recognition sequence
RINEN

SEQ ID NO: 351 - protein, 5 aa, Artificial Sequence
  Representative linear modulating agent based on T-cadherin cell adhesion recognition sequence
INENT

SEQ ID NO: 352 - protein, 6 aa, Artificial Sequence
  Representative linear modulating agent based on T-cadherin cell adhesion recognition sequence
RINENT

SEQ ID NO: 353 - protein, 5 aa, Artificial Sequence
  Representative linear modulating agent based on T-cadherin cell adhesion recognition sequence
NENTG

SEQ ID NO: 354 - protein, 6 aa, Artificial Sequence
  Representative linear modulating agent based on T-cadherin cell adhesion recognition sequence
INENTG

SEQ ID NO: 355 - protein, 7 aa, Artificial Sequence
  Representative linear modulating agent based on T-cadherin cell adhesion recognition sequence
RINENTG

SEQ ID NO: 356 - protein, 6 aa, Artificial Sequence
  Representative linear modulating agent based on T-cadherin cell adhesion recognition sequence
FRINEN

SEQ ID NO: 357 - protein, 7 aa, Artificial Sequence
  Representative linear modulating agent based on T-cadherin cell adhesion recognition sequence
FRINENT

SEQ ID NO: 358 - protein, 8 aa, Artificial Sequence
  Representative linear modulating agent based on T-cadherin cell adhesion recognition sequence
FRINENTG

SEQ ID NO: 359 - protein, 7 aa, Artificial Sequence
  Representative linear modulating agent based on T-cadherin cell adhesion recognition sequence
IFRINEN

SEQ ID NO: 360 - protein, 8 aa, Artificial Sequence
  Representative linear modulating agent based on T-cadherin cell adhesion recognition sequence
IFRINENT

SEQ ID NO: 361 - protein, 9 aa, Artificial Sequence
  Representative linear modulating agent based on T-cadherin cell adhesion recognition sequence
IFRINENTG

SEQ ID NO: 362 - protein, 4 aa, Artificial Sequence
  Representative linear modulating agent based on PB-cadherin cell adhesion recognition sequence
EEYT

SEQ ID NO: 363 - protein, 5 aa, Artificial Sequence
  Representative linear modulating agent based on PB-cadherin cell adhesion recognition sequence
EEYTG

SEQ ID NO: 364 - protein, 4 aa, Artificial Sequence
  Representative linear modulating agent based on PB-cadherin cell adhesion recognition sequence
VEEY

SEQ ID NO: 365 - protein, 5 aa, Artificial Sequence
  Representative linear modulating agent based on PB-cadherin cell adhesion recognition sequence
VEEYT

SEQ ID NO: 366 - protein, 6 aa, Artificial Sequence
  Representative linear modulating agent based on PB-cadherin cell adhesion recognition sequence
VEEYTG

SEQ ID NO: 367 - protein, 5 aa, Artificial Sequence
  Representative linear modulating agent based on PB-cadherin cell adhesion recognition sequence
VVEEY

SEQ ID NO: 368 - protein, 6 aa, Artificial Sequence
  Representative linear modulating agent based on PB-cadherin cell adhesion recognition sequence
VVEEYT

SEQ ID NO: 369 - protein, 7 aa, Artificial Sequence
  Representative linear modulating agent based on PB-cadherin cell adhesion recognition sequence
VVEEYTG

SEQ ID NO: 370 - protein, 6 aa, Artificial Sequence
  Representative linear modulating agent based on PB-cadherin cell adhesion recognition sequence
FVVEEY

SEQ ID NO: 371 - protein, 6 aa, Artificial Sequence
  Representative linear modulating agent based on PB-cadherin cell adhesion recognition sequence
FVEEYT

SEQ ID NO: 372 - protein, 7 aa, Artificial Sequence
  Representative linear modulating agent based on PB-cadherin cell adhesion recognition sequence
FVEEYTG

SEQ ID NO: 373 - protein, 7 aa, Artificial Sequence
  Representative linear modulating agent based on PB-cadherin cell adhesion recognition sequence
FFVVEEY

SEQ ID NO: 374 - protein, 8 aa, Artificial Sequence
  Representative linear modulating agent based on PB-cadherin cell adhesion recognition sequence
FFVVEEYT

SEQ ID NO: 375 - protein, 9 aa, Artificial Sequence
  Representative linear modulating agent based on PB-cadherin cell adhesion recognition sequence
FFVVEEYTG

SEQ ID NO: 376 - protein, 4 aa, Artificial Sequence
  Representative linear modulating agent based on PB-cadherin cell adhesion recognition sequence
DELT

SEQ ID NO: 377 - protein, 5 aa, Artificial Sequence
  Representative linear modulating agent based on PB-cadherin cell adhesion recognition sequence
DELTG

SEQ ID NO: 378 - protein, 4 aa, Artificial Sequence
  Representative linear modulating agent based on PB-cadherin cell adhesion recognition sequence
IDEL

SEQ ID NO: 379 - protein, 5 aa, Artificial Sequence
  Representative linear modulating agent based on PB-cadherin cell adhesion recognition sequence
IDELT

SEQ ID NO: 380 - protein, 6 aa, Artificial Sequence
  Representative linear modulating agent based on PB-cadherin cell adhesion recognition sequence
IDELTG

SEQ ID NO: 381 - protein, 5 aa, Artificial Sequence
  Representative linear modulating agent based on PB-cadherin cell adhesion recognition sequence
LIDEL

SEQ ID NO: 382 - protein, 6 aa, Artificial Sequence
  Representative linear modulating agent based on PB-cadherin cell adhesion recognition sequence
LIDELT

SEQ ID NO: 383 - protein, 7 aa, Artificial Sequence
  Representative linear modulating agent based on PB-cadherin cell adhesion recognition sequence
LIDELTG

SEQ ID NO: 384 - protein, 6 aa, Artificial Sequence
  Representative linear modulating agent based on PB-cadherin cell adhesion recognition sequence
FLIDEL

SEQ ID NO: 385 - protein, 7 aa, Artificial Sequence
  Representative linear modulating agent based on PB-cadherin cell adhesion recognition sequence
FLIDELT

SEQ ID NO: 386 - protein, 8 aa, Artificial Sequence
  Representative linear modulating agent based on PB-cadherin cell adhesion recognition sequence
FLIDELTG

SEQ ID NO: 387 - protein, 7 aa, Artificial Sequence
  Representative linear modulating agent based on PB-cadherin cell adhesion recognition sequence
IFLIDEL

SEQ ID NO: 388 - protein, 8 aa, Artificial Sequence
  Representative linear modulating agent based on PB-cadherin cell adhesion recognition sequence
IFLIDELT

SEQ ID NO: 389 - protein, 9 aa, Artificial Sequence
  Representative linear modulating agent based on PB-cadherin cell adhesion recognition sequence
IFLIDELTG

SEQ ID NO: 390 - protein, 4 aa, Artificial Sequence
  Representative linear modulating agent based on PB-cadherin cell adhesion recognition sequence
DPKT

SEQ ID NO: 391 - protein, 5 aa, Artificial Sequence
  Representative linear modulating agent based on PB-cadherin cell adhesion recognition sequence
DPKTG

SEQ ID NO: 392 - protein, 4 aa, Artificial Sequence
  Representative linear modulating agent based on PB-cadherin cell adhesion recognition sequence
VDPK

SEQ ID NO: 393 - protein, 5 aa, Artificial Sequence
  Representative linear modulating agent based on PB-cadherin cell adhesion recognition sequence
VDPKT

SEQ ID NO: 394 - protein, 6 aa, Artificial Sequence
  Representative linear modulating agent based on PB-cadherin cell adhesion recognition sequence
VDPKTG

SEQ ID NO: 395 - protein, 5 aa, Artificial Sequence
  Representative linear modulating agent based on PB-cadherin cell adhesion recognition sequence
TVDPK

SEQ ID NO: 396 - protein, 6 aa, Artificial Sequence
  Representative linear modulating agent based on PB-cadherin cell adhesion recognition sequence
TVDPKT

SEQ ID NO: 397 - protein, 7 aa, Artificial Sequence
  Representative linear modulating agent based on PB-cadherin cell adhesion recognition sequence
TVDPKTG

SEQ ID NO: 398 - protein, 6 aa, Artificial Sequence
  Representative linear modulating agent based on PB-cadherin cell adhesion recognition sequence
FTVDPK

SEQ ID NO: 399 - protein, 7 aa, Artificial Sequence
  Representative linear modulating agent based on PB-cadherin cell adhesion recognition sequence
FTVDPKT

SEQ ID NO: 400 - protein, 8 aa, Artificial Sequence
  Representative linear modulating agent based on PB-cadherin cell adhesion recognition sequence
FTVDPKTG

SEQ ID NO: 401 - protein, 7 aa, Artificial Sequence
  Representative linear modulating agent based on PB-cadherin cell adhesion recognition sequence
HFTVDPK

SEQ ID NO: 402 - protein, 8 aa, Artificial Sequence
  Representative linear modulating agent based on PB-cadherin cell adhesion recognition sequence
HFTVDPKT

SEQ ID NO: 403 - protein, 9 aa, Artificial Sequence
  Representative linear modulating agent based on PB-cadherin cell adhesion recognition sequence
HFTVDPKTG

SEQ ID NO: 404 - protein, 4 aa, Artificial Sequence
  Representative linear modulating agent based on PB-cadherin cell adhesion recognition sequence
DADT

SEQ ID NO: 405 - protein, 5 aa, Artificial Sequence
  Representative linear modulating agent based on PB-cadherin cell adhesion recognition sequence
DADTG

SEQ ID NO: 406 - protein, 4 aa, Artificial Sequence
  Representative linear modulating agent based on PB-cadherin cell adhesion recognition sequence
IDAD

SEQ ID NO: 407 - protein, 5 aa, Artificial Sequence
  Representative linear modulating agent based on PB-cadherin cell adhesion recognition sequence
IDADT

SEQ ID NO: 408 - protein, 6 aa, Artificial Sequence
  Representative linear modulating agent based on PB-cadherin cell adhesion recognition sequence
IDADTG

SEQ ID NO: 409 - protein, 5 aa, Artificial Sequence
  Representative linear modulating agent based on PB-cadherin cell adhesion recognition sequence
DIDAD

SEQ ID NO: 410 - protein, 6 aa, Artificial Sequence
  Representative linear modulating agent based on PB-cadherin cell adhesion recognition sequence
DIDADT

SEQ ID NO: 411 - protein, 7 aa, Artificial Sequence
  Representative linear modulating agent based on PB-cadherin cell adhesion recognition sequence
DIDADTG

SEQ ID NO: 412 - protein, 6 aa, Artificial Sequence
  Representative linear modulating agent based on PB-cadherin cell adhesion recognition sequence
FDIDAD

SEQ ID NO: 413 - protein, 7 aa, Artificial Sequence
  Representative linear modulating agent based on PB-cadherin cell adhesion recognition sequence
FDIDADT

SEQ ID NO: 414 - protein, 8 aa, Artificial Sequence
  Representative linear modulating agent based on PB-cadherin cell adhesion recognition sequence
FDIDADTG

SEQ ID NO: 415 - protein, 7 aa, Artificial Sequence
  Representative linear modulating agent based on PB-cadherin cell adhesion recognition sequence
IFDIDAD

SEQ ID NO: 416 - protein, 8 aa, Artificial Sequence
  Representative linear modulating agent based on PB-cadherin cell adhesion recognition sequence
IFDIDADT

SEQ ID NO: 417 - protein, 9 aa, Artificial Sequence
  Representative linear modulating agent based on PB-cadherin cell adhesion recognition sequence
IFDIDADTG

SEQ ID NO: 418 - protein, 4 aa, Artificial Sequence
  Representative linear modulating agent based on LI-cadherin cell adhesion recognition sequence
NNKT

SEQ ID NO: 419 - protein, 5 aa, Artificial Sequence
  Representative linear modulating agent based on LI-cadherin cell adhesion recognition sequence
NNKTG

SEQ ID NO: 420 - protein, 4 aa, Artificial Sequence
  Representative linear modulating agent based on LI-cadherin cell adhesion recognition sequence
INNK

SEQ ID NO: 421 - protein, 5 aa, Artificial Sequence
  Representative linear modulating agent based on LI-cadherin cell adhesion recognition sequence
INNKT

SEQ ID NO: 422 - protein, 6 aa, Artificial Sequence
  Representative linear modulating agent based on LI-cadherin cell adhesion recognition sequence
INNKTG

SEQ ID NO: 423 - protein, 5 aa, Artificial Sequence
  Representative linear modulating agent based on LI-cadherin cell adhesion recognition sequence
QINNK

SEQ ID NO: 424 - protein, 6 aa, Artificial Sequence
  Representative linear modulating agent based on LI-cadherin cell adhesion recognition sequence
QINNKT

SEQ ID NO: 425 - protein, 7 aa, Artificial Sequence
  Representative linear modulating agent based on LI-cadherin cell adhesion recognition sequence
QINNKTG

SEQ ID NO: 426 - protein, 6 aa, Artificial Sequence
  Representative linear modulating agent based on LI-cadherin cell adhesion recognition sequence
FQINNK

SEQ ID NO: 427 - protein, 7 aa, Artificial Sequence
  Representative linear modulating agent based on LI-cadherin cell adhesion recognition sequence
FQINNKT

SEQ ID NO: 428 - protein, 8 aa, Artificial Sequence
  Representative linear modulating agent based on LI-cadherin cell adhesion recognition sequence
FQINNKTG

SEQ ID NO: 429 - protein, 7 aa, Artificial Sequence
  Representative linear modulating agent based on LI-cadherin cell adhesion recognition sequence
YFQINNK

SEQ ID NO: 430 - protein, 8 aa, Artificial Sequence
  Representative linear modulating agent based on LI-cadherin cell adhesion recognition sequence
YFQINNKT

SEQ ID NO: 431 - protein, 9 aa, Artificial Sequence
  Representative linear modulating agent based on LI-cadherin cell adhesion recognition sequence
YFQINNKTG

SEQ ID NO: 432 - protein, 4 aa, Artificial Sequence
  Representative linear modulating agent based on Protocadherin cell adhesion recognition sequence
DLVT

SEQ ID NO: 433 - protein, 5 aa, Artificial Sequence
  Representative linear modulating agent based on Protocadherin cell adhesion recognition sequence
DLVTG

SEQ ID NO: 434 - protein, 4 aa, Artificial Sequence
  Representative linear modulating agent based on Protocadherin cell adhesion recognition sequence
LDLV

SEQ ID NO: 435 - protein, 5 aa, Artificial Sequence
  Representative linear modulating agent based on Protocadherin cell adhesion recognition sequence
LDLVT

SEQ ID NO: 436 - protein, 6 aa, Artificial Sequence
  Representative linear modulating agent based on Protocadherin cell adhesion recognition sequence
LDLVTG

SEQ ID NO: 437 - protein, 5 aa, Artificial Sequence
  Representative linear modulating agent based on Protocadherin cell adhesion recognition sequence
ALDLV

SEQ ID NO: 438 - protein, 6 aa, Artificial Sequence
  Representative linear modulating agent based on Protocadherin cell adhesion recognition sequence
ALDLVT

SEQ ID NO: 439 - protein, 7 aa, Artificial Sequence
  Representative linear modulating agent based on Protocadherin cell adhesion recognition sequence
ALDLVTG

SEQ ID NO: 440 - protein, 6 aa, Artificial Sequence
  Representative linear modulating agent based on Protocadherin cell adhesion recognition sequence
FALDLV

SEQ ID NO: 441 - protein, 7 aa, Artificial Sequence
  Representative linear modulating agent based on Protocadherin cell adhesion recognition sequence
FALDLVT

SEQ ID NO: 442 - protein, 8 aa, Artificial Sequence
  Representative linear modulating agent based on Protocadherin cell adhesion recognition sequence
FALDLVTG

SEQ ID NO: 443 - protein, 7 aa, Artificial Sequence
  Representative linear modulating agent based on Protocadherin cell adhesion recognition sequence
LFALDLV

SEQ ID NO: 444 - protein, 8 aa, Artificial Sequence
  Representative linear modulating agent based on Protocadherin cell adhesion recognition sequence
LFALDLVT

SEQ ID NO: 445 - protein, 9 aa, Artificial Sequence
  Representative linear modulating agent based on Protocadherin cell adhesion recognition sequence
LFALDLVTG

SEQ ID NO: 446 - protein, 4 aa, Artificial Sequence
  Representative linear modulating agent based on Protocadherin cell adhesion recognition sequence
NRDN

SEQ ID NO: 447 - protein, 5 aa, Artificial Sequence
  Representative linear modulating agent based on Protocadherin cell adhesion recognition sequence
NRDNG

SEQ ID NO: 448 - protein, 4 aa, Artificial Sequence
  Representative linear modulating agent based on Protocadherin cell adhesion recognition sequence
INRD

SEQ ID NO: 449 - protein, 5 aa, Artificial Sequence
  Representative linear modulating agent based on Protocadherin cell adhesion recognition sequence
INRDN

SEQ ID NO: 450 - protein, 6 aa, Artificial Sequence
  Representative linear modulating agent based on Protocadherin cell adhesion recognition sequence
INRDNG

SEQ ID NO: 451 - protein, 5 aa, Artificial Sequence
  Representative linear modulating agent based on Protocadherin cell adhesion recognition sequence
TINRD

SEQ ID NO: 452 - protein, 6 aa, Artificial Sequence
  Representative linear modulating agent based on Protocadherin cell adhesion recognition sequence
TINRDN

SEQ ID NO: 453 - protein, 7 aa, Artificial Sequence
  Representative linear modulating agent based on Protocadherin cell adhesion recognition sequence
TINRDNG

SEQ ID NO: 454 - protein, 6 aa, Artificial Sequence
  Representative linear modulating agent based on Protocadherin cell adhesion recognition sequence
FTINRD

SEQ ID NO: 455 - protein, 7 aa, Artificial Sequence
  Representative linear modulating agent based on Protocadherin cell adhesion recognition sequence
FTINRDN

SEQ ID NO: 456 - protein, 8 aa, Artificial Sequence
  Representative linear modulating agent based on Protocadherin cell adhesion recognition sequence
FTINRDNG

SEQ ID NO: 457 - protein, 7 aa, Artificial Sequence
  Representative linear modulating agent based on Protocadherin cell adhesion recognition sequence
YFTINRD

SEQ ID NO: 458 - protein, 8 aa, Artificial Sequence
  Representative linear modulating agent based on Protocadherin cell adhesion recognition sequence
YFTINRDN

SEQ ID NO: 459 - protein, 9 aa, Artificial Sequence
  Representative linear modulating agent based on Protocadherin cell adhesion recognition sequence
YFTINRDNG

SEQ ID NO: 460 - protein, 4 aa, Artificial Sequence
  Representative linear modulating agent based on Protocadherin cell adhesion recognition sequence
DPKT

SEQ ID NO: 461 - protein, 5 aa, Artificial Sequence
  Representative linear modulating agent based on Protocadherin cell adhesion recognition sequence
DPKTG

SEQ ID NO: 462 - protein, 4 aa, Artificial Sequence
  Representative linear modulating agent based on Protocadherin cell adhesion recognition sequence
IDPK

SEQ ID NO: 463 - protein, 5 aa, Artificial Sequence
  Representative linear modulating agent based on Protocadherin cell adhesion recognition sequence
IDPKT

SEQ ID NO: 464 - protein, 6 aa, Artificial Sequence
  Representative linear modulating agent based on Protocadherin cell adhesion recognition sequence
IDPKTG

SEQ ID NO: 465 - protein, 5 aa, Artificial Sequence
  Representative linear modulating agent based on Protocadherin cell adhesion recognition sequence
SIDPK

SEQ ID NO: 466 - protein, 6 aa, Artificial Sequence
  Representative linear modulating agent based on Protocadherin cell adhesion recognition sequence
SIDPKT

SEQ ID NO: 467 - protein, 7 aa, Artificial Sequence
  Representative linear modulating agent based on Protocadherin cell adhesion recognition sequence
SIDPKTG

SEQ ID NO: 468 - protein, 6 aa, Artificial Sequence
  Representative linear modulating agent based on Protocadherin cell adhesion recognition sequence
FSIDPK

SEQ ID NO: 469 - protein, 7 aa, Artificial Sequence
  Representative linear modulating agent based on Protocadherin cell adhesion recognition sequence
FSIDPKT

SEQ ID NO: 470 - protein, 8 aa, Artificial Sequence
  Representative linear modulating agent based on Protocadherin cell adhesion recognition sequence
FSIDPKTG

SEQ ID NO: 471 - protein, 7 aa, Artificial Sequence
  Representative linear modulating agent based on Protocadherin cell adhesion recognition sequence
LFSIDPK

SEQ ID NO: 472 - protein, 8 aa, Artificial Sequence
  Representative linear modulating agent based on Protocadherin cell adhesion recognition sequence
LFSIDPKT

SEQ ID NO: 473 - protein, 9 aa, Artificial Sequence
  Representative linear modulating agent based on Protocadherin cell adhesion recognition sequence
LFSIDPKTG

SEQ ID NO: 474 - protein, 4 aa, Artificial Sequence
  Representative linear modulating agent based on Protocadherin cell adhesion recognition sequence
DPSS

SEQ ID NO: 475 - protein, 5 aa, Artificial Sequence
  Representative linear modulating agent based on Protocadherin cell adhesion recognition sequence
DPSSG

SEQ ID NO: 476 - protein, 4 aa, Artificial Sequence
  Representative linear modulating agent based on Protocadherin cell adhesion recognition sequence
IDPS

SEQ ID NO: 477 - protein, 5 aa, Artificial Sequence
  Representative linear modulating agent based on Protocadherin cell adhesion recognition sequence
IDPSS

SEQ ID NO: 478 - protein, 6 aa, Artificial Sequence
  Representative linear modulating agent based on Protocadherin cell adhesion recognition sequence
IDPSSG

SEQ ID NO: 479 - protein, 5 aa, Artificial Sequence
  Representative linear modulating agent based on Protocadherin cell adhesion recognition sequence
EIDPS

SEQ ID NO: 480 - protein, 6 aa, Artificial Sequence
  Representative linear modulating agent based on Protocadherin cell adhesion recognition sequence
EIDPSS

SEQ ID NO: 481 - protein, 7 aa, Artificial Sequence
  Representative linear modulating agent based on Protocadherin cell adhesion recognition sequence
EIDPSSG

SEQ ID NO: 482 - protein, 6 aa, Artificial Sequence
  Representative linear modulating agent based on Protocadherin cell adhesion recognition sequence
FEIDPS

SEQ ID NO: 483 - protein, 7 aa, Artificial Sequence
  Representative linear modulating agent based on Protocadherin cell adhesion recognition sequence
FEIDPSS

SEQ ID NO: 484 - protein, 6 aa, Artificial Sequence
  Representative linear modulating agent based on Protocadherin cell adhesion recognition sequence
FEIDPS

SEQ ID NO: 485 - protein, 7 aa, Artificial Sequence
  Representative linear modulating agent based on Protocadherin cell adhesion recognition sequence
FEIDPSS

SEQ ID NO: 486 - protein, 8 aa, Artificial Sequence
  Representative linear modulating agent based on Protocadherin cell adhesion recognition sequence
FEIDPSSG

SEQ ID NO: 487 - protein, 7 aa, Artificial Sequence
  Representative linear modulating agent based on Protocadherin cell adhesion recognition sequence
LFEIDPS

SEQ ID NO: 488 - protein, 8 aa, Artificial Sequence
  Representative linear modulating agent based on Protocadherin cell adhesion recognition sequence
LFEIDPSS

SEQ ID NO: 489 - protein, 9 aa, Artificial Sequence
  Representative linear modulating agent based on Protocadherin cell adhesion recognition sequence
LFEIDPSSG

SEQ ID NO: 490 - protein, 4 aa, Artificial Sequence
  Representative linear modulating agent based on Desomglein cell adhesion recognition sequence
NQKT

SEQ ID NO: 491 - protein, 5 aa, Artificial Sequence
  Representative linear modulating agent based on Desomglein cell adhesion recognition sequence
NQKTG

SEQ ID NO: 492 - protein, 4 aa, Artificial Sequence
  Representative linear modulating agent based on Desomglein cell adhesion recognition sequence
INQK

SEQ ID NO: 493 - protein, 5 aa, Artificial Sequence
  Representative linear modulating agent based on Desomglein cell adhesion recognition sequence
INQKT

SEQ ID NO: 494 - protein, 6 aa, Artificial Sequence
  Representative linear modulating agent based on Desomglein cell adhesion recognition sequence
INQKTG

SEQ ID NO: 495 - protein, 5 aa, Artificial Sequence
  Representative linear modulating agent based on Desomglein cell adhesion recognition sequence
VINQK

SEQ ID NO: 496 - protein, 6 aa, Artificial Sequence
  Representative linear modulating agent based on Desomglein cell adhesion recognition sequence
VINQKT

SEQ ID NO: 497 - protein, 7 aa, Artificial Sequence
  Representative linear modulating agent based on Desomglein cell adhesion recognition sequence
VINQKTG

SEQ ID NO: 498 - protein, 6 aa, Artificial Sequence
  Representative linear modulating agent based on Desomglein cell adhesion recognition sequence
FVINQK

SEQ ID NO: 499 - protein, 7 aa, Artificial Sequence
  Representative linear modulating agent based on Desomglein cell adhesion recognition sequence
FVINQKT

SEQ ID NO: 500 - protein, 8 aa, Artificial Sequence
  Representative linear modulating agent based on Desomglein cell adhesion recognition sequence
FVINQKTG

SEQ ID NO: 501 - protein, 7 aa, Artificial Sequence
  Representative linear modulating agent based on Desomglein cell adhesion recognition sequence
IFVINQK

SEQ ID NO: 502 - protein, 8 aa, Artificial Sequence
  Representative linear modulating agent based on Desomglein cell adhesion recognition sequence
IFVINQKT

SEQ ID NO: 503 - protein, 9 aa, Artificial Sequence
  Representative linear modulating agent based on Desomglein cell adhesion recognition sequence
IFVINQKTG

SEQ ID NO: 504 - protein, 4 aa, Artificial Sequence
  Representative linear modulating agent based on Desomglein cell adhesion recognition sequence
NRNT

SEQ ID NO: 505 - protein, 5 aa, Artificial Sequence
  Representative linear modulating agent based on Desomglein cell adhesion recognition sequence
NRNTG

SEQ ID NO: 506 - protein, 4 aa, Artificial Sequence
  Representative linear modulating agent based on Desomglein cell adhesion recognition sequence
INRN

SEQ ID NO: 507 - protein, 5 aa, Artificial Sequence
  Representative linear modulating agent based on Desomglein cell adhesion recognition sequence
INRNT

SEQ ID NO: 508 - protein, 6 aa, Artificial Sequence
  Representative linear modulating agent based on Desomglein cell adhesion recognition sequence
INRNTG

SEQ ID NO: 509 - protein, 5 aa, Artificial Sequence
  Representative linear modulating agent based on Desomglein cell adhesion recognition sequence
IINRN

SEQ ID NO: 510 - protein, 6 aa, Artificial Sequence
  Representative linear modulating agent based on Desomglein cell adhesion recognition sequence
IINRNT

SEQ ID NO: 511 - protein, 7 aa, Artificial Sequence
  Representative linear modulating agent based on Desomglein cell adhesion recognition sequence
IINRNTG

SEQ ID NO: 512 - protein, 6 aa, Artificial Sequence
  Representative linear modulating agent based on Desomglein cell adhesion recognition sequence
FIINRN

SEQ ID NO: 513 - protein, 7 aa, Artificial Sequence
  Representative linear modulating agent based on Desomglein cell adhesion recognition sequence
FIINRNT

SEQ ID NO: 514 - protein, 8 aa, Artificial Sequence
  Representative linear modulating agent based on Desomglein cell adhesion recognition sequence
FIINRNTG

SEQ ID NO: 515 - protein, 7 aa, Artificial Sequence
  Representative linear modulating agent based on Desomglein cell adhesion recognition sequence
MFIINRN

SEQ ID NO: 516 - protein, 8 aa, Artificial Sequence
  Representative linear modulating agent based on Desomglein cell adhesion recognition sequence
MFIINRNT

SEQ ID NO: 517 - protein, 9 aa, Artificial Sequence
  Representative linear modulating agent based on Desomglein cell adhesion recognition sequence
MFIINRNTG

SEQ ID NO: 518 - protein, 4 aa, Artificial Sequence
  Representative linear modulating agent based on Desomglein cell adhesion recognition sequence
NKDT

SEQ ID NO: 519 - protein, 5 aa, Artificial Sequence
  Representative linear modulating agent based on Desomglein cell adhesion recognition sequence
NKDTG

SEQ ID NO: 520 - protein, 4 aa, Artificial Sequence
  Representative linear modulating agent based on Desomglein cell adhesion recognition sequence
LNKD

SEQ ID NO: 521 - protein, 5 aa, Artificial Sequence
  Representative linear modulating agent based on Desomglein cell adhesion recognition sequence
LNKDT

SEQ ID NO: 522 - protein, 6 aa, Artificial Sequence
  Representative linear modulating agent based on Desomglein cell adhesion recognition sequence
LNKDTG

SEQ ID NO: 523 - protein, 5 aa, Artificial Sequence
  Representative linear modulating agent based on Desomglein cell adhesion recognition sequence
YLNKD

SEQ ID NO: 524 - protein, 6 aa, Artificial Sequence
  Representative linear modulating agent based on Desomglein cell adhesion recognition sequence
YLNKDT

SEQ ID NO: 525 - protein, 7 aa, Artificial Sequence
  Representative linear modulating agent based on Desomglein cell adhesion recognition sequence
YLNKDTG

SEQ ID NO: 526 - protein, 6 aa, Artificial Sequence
  Representative linear modulating agent based on Desomglein cell adhesion recognition sequence
FYLNKD

SEQ ID NO: 527 - protein, 7 aa, Artificial Sequence
  Representative linear modulating agent based on Desomglein cell adhesion recognition sequence
FYLNKDT

SEQ ID NO: 528 - protein, 8 aa, Artificial Sequence
  Representative linear modulating agent based on Desomglein cell adhesion recognition sequence
FYLNKDTG

SEQ ID NO: 529 - protein, 7 aa, Artificial Sequence
  Representative linear modulating agent based on Desomglein cell adhesion recognition sequence
VFYLNKD

SEQ ID NO: 530 - protein, 8 aa, Artificial Sequence
  Representative linear modulating agent based on Desomglein cell adhesion recognition sequence
VFYLNKDT

SEQ ID NO: 531 - protein, 9 aa, Artificial Sequence
  Representative linear modulating agent based on Desomglein cell adhesion recognition sequence
VFYLNKDTG

SEQ ID NO: 532 - protein, 4 aa, Artificial Sequence
  Representative linear modulating agent based on Desmocollin cell adhesion recognition sequence
EKDT

SEQ ID NO: 533 - protein, 5 aa, Artificial Sequence
  Representative linear modulating agent based on Desmocollin cell adhesion recognition sequence
EKDTG

SEQ ID NO: 534 - protein, 4 aa, Artificial Sequence
  Representative linear modulating agent based on Desmocollin cell adhesion recognition sequence
IEKD

SEQ ID NO: 535 - protein, 5 aa, Artificial Sequence
  Representative linear modulating agent based on Desmocollin cell adhesion recognition sequence
IEKDT

SEQ ID NO: 536 - protein, 6 aa, Artificial Sequence
  Representative linear modulating agent based on Desmocollin cell adhesion recognition sequence
IEKDTG

SEQ ID NO: 537 - protein, 5 aa, Artificial Sequence
  Representative linear modulating agent based on Desmocollin cell adhesion recognition sequence
YIEKD

SEQ ID NO: 538 - protein, 6 aa, Artificial Sequence
  Representative linear modulating agent based on Desmocollin cell adhesion recognition sequence
YIEKDT

SEQ ID NO: 539 - protein, 7 aa, Artificial Sequence
  Representative linear modulating agent based on Desmocollin cell adhesion recognition sequence
YIEKDTG

SEQ ID NO: 540 - protein, 6 aa, Artificial Sequence
  Representative linear modulating agent based on Desmocollin cell adhesion recognition sequence
FYIEKD

SEQ ID NO: 541 - protein, 7 aa, Artificial Sequence
  Representative linear modulating agent based on Desmocollin cell adhesion recognition sequence
FYIEKDT

SEQ ID NO: 542 - protein, 8 aa, Artificial Sequence
  Representative linear modulating agent based on Desmocollin cell adhesion recognition sequence
FYIEKDTG

SEQ ID NO: 543 - protein, 7 aa, Artificial Sequence
  Representative linear modulating agent based on Desmocollin cell adhesion recognition sequence
LFYIEKD

SEQ ID NO: 544 - protein, 8 aa, Artificial Sequence
  Representative linear modulating agent based on Desmocollin cell adhesion recognition sequence
LFYIEKDT

SEQ ID NO: 545 - protein, 9 aa, Artificial Sequence
  Representative linear modulating agent based on Desmocollin cell adhesion recognition sequence
LFYIEKDTG

SEQ ID NO: 546 - protein, 4 aa, Artificial Sequence
  Representative linear modulating agent based on Desmocollin cell adhesion recognition sequence
ERDT

SEQ ID NO: 547 - protein, 5 aa, Artificial Sequence
  Representative linear modulating agent based on Desmocollin cell adhesion recognition sequence
ERDTG

SEQ ID NO: 548 - protein, 4 aa, Artificial Sequence
  Representative linear modulating agent based on Desmocollin cell adhesion recognition sequence
VERD

SEQ ID NO: 549 - protein, 5 aa, Artificial Sequence
  Representative linear modulating agent based on Desmocollin cell adhesion recognition sequence
VERDT

SEQ ID NO: 550 - protein, 6 aa, Artificial Sequence
  Representative linear modulating agent based on Desmocollin cell adhesion recognition sequence
VERDTG

SEQ ID NO: 551 - protein, 5 aa, Artificial Sequence
  Representative linear modulating agent based on Desmocollin cell adhesion recognition sequence
YVERD

SEQ ID NO: 552 - protein, 6 aa, Artificial Sequence
  Representative linear modulating agent based on Desmocollin cell adhesion recognition sequence
YVERDT

SEQ ID NO: 553 - protein, 7 aa, Artificial Sequence
  Representative linear modulating agent based on Desmocollin cell adhesion recognition sequence
YVERDTG

SEQ ID NO: 554 - protein, 6 aa, Artificial Sequence
  Representative linear modulating agent based on Desmocollin cell adhesion recognition sequence
FYVERD

SEQ ID NO: 555 - protein, 7 aa, Artificial Sequence
  Representative linear modulating agent based on Desmocollin cell adhesion recognition sequence
FYVERDT

SEQ ID NO: 556 - protein, 8 aa, Artificial Sequence
  Representative linear modulating agent based on Desmocollin cell adhesion recognition sequence
FYVERDTG

SEQ ID NO: 557 - protein, 7 aa, Artificial Sequence
  Representative linear modulating agent based on Desmocollin cell adhesion recognition sequence
LFYVERD

SEQ ID NO: 558 - protein, 8 aa, Artificial Sequence
  Representative linear modulating agent based on Desmocollin cell adhesion recognition sequence
LFYVERDT

SEQ ID NO: 559 - protein, 9 aa, Artificial Sequence
  Representative linear modulating agent based on Desmocollin cell adhesion recognition sequence
LFYVERDTG

SEQ ID NO: 560 - protein, 4 aa, Artificial Sequence
  Representative linear modulating agent based on Desmocollin cell adhesion recognition sequence
IERD

SEQ ID NO: 561 - protein, 5 aa, Artificial Sequence
  Representative linear modulating agent based on Desmocollin cell adhesion recognition sequence
IERDT

SEQ ID NO: 562 - protein, 6 aa, Artificial Sequence
  Representative linear modulating agent based on Desmocollin cell adhesion recognition sequence
IERDTG

SEQ ID NO: 563 - protein, 5 aa, Artificial Sequence
  Representative linear modulating agent based on Desmocollin cell adhesion recognition sequence
YIERD

SEQ ID NO: 564 - protein, 6 aa, Artificial Sequence
  Representative linear modulating agent based on Desmocollin cell adhesion recognition sequence
YIERDT

SEQ ID NO: 565 - protein, 7 aa, Artificial Sequence
  Representative linear modulating agent based on Desmocollin cell adhesion recognition sequence
YIERDTG

SEQ ID NO: 566 - protein, 6 aa, Artificial Sequence
  Representative linear modulating agent based on Desmocollin cell adhesion recognition sequence
FYIERD

SEQ ID NO: 567 - protein, 7 aa, Artificial Sequence
  Representative linear modulating agent based on Desmocollin cell adhesion recognition sequence
FYIERDT

SEQ ID NO: 568 - protein, 8 aa, Artificial Sequence
  Representative linear modulating agent based on Desmocollin cell adhesion recognition sequence
FYIERDTG

SEQ ID NO: 569 - protein, 7 aa, Artificial Sequence
  Representative linear modulating agent based on Desmocollin cell adhesion recognition sequence
LFYIERD

SEQ ID NO: 570 - protein, 8 aa, Artificial Sequence
  Representative linear modulating agent based on Desmocollin cell adhesion recognition sequence
LFYIERDT

SEQ ID NO: 571 - protein, 9 aa, Artificial Sequence
  Representative linear modulating agent based on Desmocollin cell adhesion recognition sequence
LFYIERDTG

SEQ ID NO: 572 - protein, 4 aa, Artificial Sequence
  Representative linear modulating agent based on cadherin-related neuronal receptor cell adhesion recognition sequence
DPVS

SEQ ID NO: 573 - protein, 5 aa, Artificial Sequence
  Representative linear modulating agent based on cadherin-related neuronal receptor cell adhesion recognition sequence
DPVSG

SEQ ID NO: 574 - protein, 4 aa, Artificial Sequence
  Representative linear modulating agent based on cadherin-related neuronal receptor cell adhesion recognition sequence
IDPV

SEQ ID NO: 575 - protein, 5 aa, Artificial Sequence
  Representative linear modulating agent based on cadherin-related neuronal receptor cell adhesion recognition sequence
IDPVS

SEQ ID NO: 576 - protein, 6 aa, Artificial Sequence
  Representative linear modulating agent based on cadherin-related neuronal receptor cell adhesion recognition sequence
IDPVSG

SEQ ID NO: 577 - protein, 5 aa, Artificial Sequence
  Representative linear modulating agent based on cadherin-related neuronal receptor cell adhesion recognition sequence
HIDPV

SEQ ID NO: 578 - protein, 6 aa, Artificial Sequence
  Representative linear modulating agent based on cadherin-related neuronal receptor cell adhesion recognition sequence
HIDPVS

SEQ ID NO: 579 - protein, 7 aa, Artificial Sequence
  Representative linear modulating agent based on cadherin-related neuronal receptor cell adhesion recognition sequence
HIDPVSG

SEQ ID NO: 580 - protein, 6 aa, Artificial Sequence
  Representative linear modulating agent based on cadherin-related neuronal receptor cell adhesion recognition sequence
FHIDPV

SEQ ID NO: 581 - protein, 7 aa, Artificial Sequence
  Representative linear modulating agent based on cadherin-related neuronal receptor cell adhesion recognition sequence
FHIDPVS

SEQ ID NO: 582 - protein, 8 aa, Artificial Sequence
  Representative linear modulating agent based on cadherin-related neuronal receptor cell adhesion recognition sequence
FHIDPVSG

SEQ ID NO: 583 - protein, 7 aa, Artificial Sequence
  Representative linear modulating agent based on cadherin-related neuronal receptor cell adhesion recognition sequence
KFHIDPV

SEQ ID NO: 584 - protein, 8 aa, Artificial Sequence
  Representative linear modulating agent based on cadherin-related neuronal receptor cell adhesion recognition sequence
KFHIDPVS

SEQ ID NO: 585 - protein, 9 aa, Artificial Sequence
  Representative linear modulating agent based on cadherin-related neuronal receptor cell adhesion recognition sequence
KFHIDPVSG

SEQ ID NO: 586 - protein, 4 aa, Artificial Sequence
  Representative linear modulating agent based on cadherin-related neuronal receptor cell adhesion recognition sequence
DADT

SEQ ID NO: 587 - protein, 5 aa, Artificial Sequence
  Representative linear modulating agent based on cadherin-related neuronal receptor cell adhesion recognition sequence
DADTG

SEQ ID NO: 588 - protein, 4 aa, Artificial Sequence
  Representative linear modulating agent based on cadherin-related neuronal receptor cell adhesion recognition sequence
IDAD

SEQ ID NO: 589 - protein, 5 aa, Artificial Sequence
  Representative linear modulating agent based on cadherin-related neuronal receptor cell adhesion recognition sequence
IDADT

SEQ ID NO: 590 - protein, 6 aa, Artificial Sequence
  Representative linear modulating agent based on cadherin-related neuronal receptor cell adhesion recognition sequence
IDADTG

SEQ ID NO: 591 - protein, 5 aa, Artificial Sequence
  Representative linear modulating agent based on cadherin-related neuronal receptor cell adhesion recognition sequence
SIDAD

SEQ ID NO: 592 - protein, 6 aa, Artificial Sequence
  Representative linear modulating agent based on cadherin-related neuronal receptor cell adhesion recognition sequence
SIDADT

SEQ ID NO: 593 - protein, 7 aa, Artificial Sequence
  Representative linear modulating agent based on cadherin-related neuronal receptor cell adhesion recognition sequence
SIDADTG

SEQ ID NO: 594 - protein, 6 aa, Artificial Sequence
  Representative linear modulating agent based on cadherin-related neuronal receptor cell adhesion recognition sequence
FSIDAD

SEQ ID NO: 595 - protein, 7 aa, Artificial Sequence
  Representative linear modulating agent based on cadherin-related neuronal receptor cell adhesion recognition sequence
FSIDADT

SEQ ID NO: 596 - protein, 8 aa, Artificial Sequence
  Representative linear modulating agent based on cadherin-related neuronal receptor cell adhesion recognition sequence
FSIDADTG

SEQ ID NO: 597 - protein, 7 aa, Artificial Sequence
  Representative linear modulating agent based on cadherin-related neuronal receptor cell adhesion recognition sequence
QFSIDAD

SEQ ID NO: 598 - protein, 8 aa, Artificial Sequence
  Representative linear modulating agent based on cadherin-related neuronal receptor cell adhesion recognition sequence
QFSIDADT

SEQ ID NO: 599 - protein, 9 aa, Artificial Sequence
  Representative linear modulating agent based on cadherin-related neuronal receptor cell adhesion recognition sequence
QFSIDADTG

SEQ ID NO: 600 - protein, 4 aa, Artificial Sequence
  Representative linear modulating agent based on cadherin-related neuronal receptor cell adhesion recognition sequence
DSVS

SEQ ID NO: 601 - protein, 5 aa, Artificial Sequence
  Representative linear modulating agent based on cadherin-related neuronal receptor cell adhesion recognition sequence
DSVSG

SEQ ID NO: 602 - protein, 4 aa, Artificial Sequence
  Representative linear modulating agent based on cadherin-related neuronal receptor cell adhesion recognition sequence
IDSV

SEQ ID NO: 603 - protein, 5 aa, Artificial Sequence
  Representative linear modulating agent based on cadherin-related neuronal receptor cell adhesion recognition sequence
IDSVS

SEQ ID NO: 604 - protein, 6 aa, Artificial Sequence
  Representative linear modulating agent based on cadherin-related neuronal receptor cell adhesion recognition sequence
IDSVSG

SEQ ID NO: 605 - protein, 5 aa, Artificial Sequence
  Representative linear modulating agent based on cadherin-related neuronal receptor cell adhesion recognition sequence
HIDSV

SEQ ID NO: 606 - protein, 6 aa, Artificial Sequence
  Representative linear modulating agent based on cadherin-related neuronal receptor cell adhesion recognition sequence
HIDSVS

SEQ ID NO: 607 - protein, 7 aa, Artificial Sequence
  Representative linear modulating agent based on cadherin-related neuronal receptor cell adhesion recognition sequence
HIDSVSG

SEQ ID NO: 608 - protein, 6 aa, Artificial Sequence
  Representative linear modulating agent based on cadherin-related neuronal receptor cell adhesion recognition sequence
FHIDSV

SEQ ID NO: 609 - protein, 7 aa, Artificial Sequence
  Representative linear modulating agent based on cadherin-related neuronal receptor cell adhesion recognition sequence
FHIDSVS

SEQ ID NO: 610 - protein, 8 aa, Artificial Sequence
  Representative linear modulating agent based on cadherin-related neuronal receptor cell adhesion recognition sequence
FHIDSVSG

SEQ ID NO: 611 - protein, 7 aa, Artificial Sequence
  Representative linear modulating agent based on cadherin-related neuronal receptor cell adhesion recognition sequence
TFHIDSV

SEQ ID NO: 612 - protein, 8 aa, Artificial Sequence
  Representative linear modulating agent based on cadherin-related neuronal receptor cell adhesion recognition sequence
TFHIDSVS

SEQ ID NO: 613 - protein, 9 aa, Artificial Sequence
  Representative linear modulating agent based on cadherin-related neuronal receptor cell adhesion recognition sequence
TFHIDSVSG

SEQ ID NO: 614 - protein, 4 aa, Artificial Sequence
  Representative linear modulating agent based on cadherin-related neuronal receptor cell adhesion recognition sequence
DSNS

SEQ ID NO: 615 - protein, 5 aa, Artificial Sequence
  Representative linear modulating agent based on cadherin-related neuronal receptor cell adhesion recognition sequence
DSNSG

SEQ ID NO: 616 - protein, 4 aa, Artificial Sequence
  Representative linear modulating agent based on cadherin-related neuronal receptor cell adhesion recognition sequence
IDSN

SEQ ID NO: 617 - protein, 5 aa, Artificial Sequence
  Representative linear modulating agent based on cadherin-related neuronal receptor cell adhesion recognition sequence
IDSNS

SEQ ID NO: 618 - protein, 6 aa, Artificial Sequence
  Representative linear modulating agent based on cadherin-related neuronal receptor cell adhesion recognition sequence
IDSNSG

SEQ ID NO: 619 - protein, 5 aa, Artificial Sequence
  Representative linear modulating agent based on cadherin-related neuronal receptor cell adhesion recognition sequence
NIDSN

SEQ ID NO: 620 - protein, 6 aa, Artificial Sequence
  Representative linear modulating agent based on cadherin-related neuronal receptor cell adhesion recognition sequence
NIDSNS

SEQ ID NO: 621 - protein, 7 aa, Artificial Sequence
  Representative linear modulating agent based on cadherin-related neuronal receptor cell adhesion recognition sequence
NIDSNSG

SEQ ID NO: 622 - protein, 6 aa, Artificial Sequence
  Representative linear modulating agent based on cadherin-related neuronal receptor cell adhesion recognition sequence
FNIDSN

SEQ ID NO: 623 - protein, 7 aa, Artificial Sequence
  Representative linear modulating agent based on cadherin-related neuronal receptor cell adhesion recognition sequence
FNIDSNS

SEQ ID NO: 624 - protein, 8 aa, Artificial Sequence
  Representative linear modulating agent based on cadherin-related neuronal receptor cell adhesion recognition sequence
FNIDSNSG

SEQ ID NO: 625 - protein, 7 aa, Artificial Sequence
  Representative linear modulating agent based on cadherin-related neuronal receptor cell adhesion recognition sequence
AFNIDSN

SEQ ID NO: 626 - protein, 8 aa, Artificial Sequence
  Representative linear modulating agent based on cadherin-related neuronal receptor cell adhesion recognition sequence
AFNIDSNS

SEQ ID NO: 627 - protein, 9 aa, Artificial Sequence
  Representative linear modulating agent based on cadherin-related neuronal receptor cell adhesion recognition sequence
AFNIDSNSG

SEQ ID NO: 628 - protein, 4 aa, Artificial Sequence
  Representative linear modulating agent based on cadherin-related neuronal receptor cell adhesion recognition sequence
DSSS

SEQ ID NO: 629 - protein, 5 aa, Artificial Sequence
  Representative linear modulating agent based on cadherin-related neuronal receptor cell adhesion recognition sequence
DSSSG

SEQ ID NO: 630 - protein, 4 aa, Artificial Sequence
  Representative linear modulating agent based on cadherin-related neuronal receptor cell adhesion recognition sequence
IDSS

SEQ ID NO: 631 - protein, 5 aa, Artificial Sequence
  Representative linear modulating agent based on cadherin-related neuronal receptor cell adhesion recognition sequence
IDSSS

SEQ ID NO: 632 - protein, 6 aa, Artificial Sequence
  Representative linear modulating agent based on cadherin-related neuronal receptor cell adhesion recognition sequence
IDSSSG

SEQ ID NO: 633 - protein, 5 aa, Artificial Sequence
  Representative linear modulating agent based on cadherin-related neuronal receptor cell adhesion recognition sequence
TIDSS

SEQ ID NO: 634 - protein, 6 aa, Artificial Sequence
  Representative linear modulating agent based on cadherin-related neuronal receptor cell adhesion recognition sequence
TIDSSS

SEQ ID NO: 635 - protein, 7 aa, Artificial Sequence
  Representative linear modulating agent based on cadherin-related neuronal receptor cell adhesion recognition sequence
TIDSSSG

SEQ ID NO: 636 - protein, 6 aa, Artificial Sequence
  Representative linear modulating agent based on cadherin-related neuronal receptor cell adhesion recognition sequence
FTIDSS

SEQ ID NO: 637 - protein, 7 aa, Artificial Sequence
  Representative linear modulating agent based on cadherin-related neuronal receptor cell adhesion recognition sequence
FTIDSSS

SEQ ID NO: 638 - protein, 8 aa, Artificial Sequence
  Representative linear modulating agent based on cadherin-related neuronal receptor cell adhesion recognition sequence
FTIDSSSG

SEQ ID NO: 639 - protein, 7 aa, Artificial Sequence
  Representative linear modulating agent based on cadherin-related neuronal receptor cell adhesion recognition sequence
KFTIDSS

SEQ ID NO: 640 - protein, 8 aa, Artificial Sequence
  Representative linear modulating agent based on cadherin-related neuronal receptor cell adhesion recognition sequence
KFTIDSSS

SEQ ID NO: 641 - protein, 9 aa, Artificial Sequence
  Representative linear modulating agent based on cadherin-related neuronal receptor cell adhesion recognition sequence
KFTIDSSSG

SEQ ID NO: 642 - protein, 4 aa, Artificial Sequence
  Representative linear modulating agent based on cadherin-related neuronal receptor cell adhesion recognition sequence
DEKN

SEQ ID NO: 643 - protein, 5 aa, Artificial Sequence
  Representative linear modulating agent based on cadherin-related neuronal receptor cell adhesion recognition sequence
DEKNG

SEQ ID NO: 644 - protein, 4 aa, Artificial Sequence
  Representative linear modulating agent based on cadherin-related neuronal receptor cell adhesion recognition sequence
LDEK

SEQ ID NO: 645 - protein, 5 aa, Artificial Sequence
  Representative linear modulating agent based on cadherin-related neuronal receptor cell adhesion recognition sequence
LDEKN

SEQ ID NO: 646 - protein, 6 aa, Artificial Sequence
  Representative linear modulating agent based on cadherin-related neuronal receptor cell adhesion recognition sequence
LDEKNG

SEQ ID NO: 647 - protein, 5 aa, Artificial Sequence
  Representative linear modulating agent based on cadherin-related neuronal receptor cell adhesion recognition sequence
TLDEK

SEQ ID NO: 648 - protein, 6 aa, Artificial Sequence
  Representative linear modulating agent based on cadherin-related neuronal receptor cell adhesion recognition sequence
TLDEKN

SEQ ID NO: 649 - protein, 7 aa, Artificial Sequence
  Representative linear modulating agent based on cadherin-related neuronal receptor cell adhesion recognition sequence
TLDEKNG

SEQ ID NO: 650 - protein, 6 aa, Artificial Sequence
  Representative linear modulating agent based on cadherin-related neuronal receptor cell adhesion recognition sequence
FTLDEK

SEQ ID NO: 651 - protein, 7 aa, Artificial Sequence
  Representative linear modulating agent based on cadherin-related neuronal receptor cell adhesion recognition sequence
FTLDEKN

SEQ ID NO: 652 - protein, 8 aa, Artificial Sequence
  Representative linear modulating agent based on cadherin-related neuronal receptor cell adhesion recognition sequence
FTLDEKNG

SEQ ID NO: 653 - protein, 7 aa, Artificial Sequence
  Representative linear modulating agent based on cadherin-related neuronal receptor cell adhesion recognition sequence
LFTLDEK

SEQ ID NO: 654 - protein, 8 aa, Artificial Sequence
  Representative linear modulating agent based on cadherin-related neuronal receptor cell adhesion recognition sequence
LFTLDEKN

SEQ ID NO: 655 - protein, 9 aa, Artificial Sequence
  Representative linear modulating agent based on cadherin-related neuronal receptor cell adhesion recognition sequence
LFTLDEKNG

SEQ ID NO: 656 - protein, 4 aa, Artificial Sequence
  Representative linear modulating agent based on cadherin-related neuronal receptor cell adhesion recognition sequence
NEKT

SEQ ID NO: 657 - protein, 5 aa, Artificial Sequence
  Representative linear modulating agent based on cadherin-related neuronal receptor cell adhesion recognition sequence
NEKTG

SEQ ID NO: 658 - protein, 4 aa, Artificial Sequence
  Representative linear modulating agent based on cadherin-related neuronal receptor cell adhesion recognition sequence
INEK

SEQ ID NO: 659 - protein, 5 aa, Artificial Sequence
  Representative linear modulating agent based on cadherin-related neuronal receptor cell adhesion recognition sequence
INEKT

SEQ ID NO: 660 - protein, 6 aa, Artificial Sequence
  Representative linear modulating agent based on cadherin-related neuronal receptor cell adhesion recognition sequence
INEKTG

SEQ ID NO: 661 - protein, 5 aa, Artificial Sequence
  Representative linear modulating agent based on cadherin-related neuronal receptor cell adhesion recognition sequence
LINEK

SEQ ID NO: 662 - protein, 6 aa, Artificial Sequence
  Representative linear modulating agent based on cadherin-related neuronal receptor cell adhesion recognition sequence
LINEKT

SEQ ID NO: 663 - protein, 7 aa, Artificial Sequence
  Representative linear modulating agent based on cadherin-related neuronal receptor cell adhesion recognition sequence
LINEKTG

SEQ ID NO: 664 - protein, 6 aa, Artificial Sequence
  Representative linear modulating agent based on cadherin-related neuronal receptor cell adhesion recognition sequence
FLINEK

SEQ ID NO: 665 - protein, 7 aa, Artificial Sequence
  Representative linear modulating agent based on cadherin-related neuronal receptor cell adhesion recognition sequence
FLINEKT

SEQ ID NO: 666 - protein, 8 aa, Artificial Sequence
  Representative linear modulating agent based on cadherin-related neuronal receptor cell adhesion recognition sequence
FLINEKTG

SEQ ID NO: 667 - protein, 7 aa, Artificial Sequence
  Representative linear modulating agent based on cadherin-related neuronal receptor cell adhesion recognition sequence
KFLINEK

SEQ ID NO: 668 - protein, 8 aa, Artificial Sequence
  Representative linear modulating agent based on cadherin-related neuronal receptor cell adhesion recognition sequence
KFLINEKT

SEQ ID NO: 669 - protein, 5 aa, Artificial Sequence
  Representative cyclic modulating agent based on OB-cadherin cell adhesion recognition sequence
CDDKC

SEQ ID NO: 670 - protein, 6 aa, Artificial Sequence
  Representative cyclic modulating agent based on OB-cadherin cell adhesion recognition sequence
CIDDKC

SEQ ID NO: 671 - protein, 6 aa, Artificial Sequence
  Representative cyclic modulating agent based on OB-cadherin cell adhesion recognition sequence
CDDKSC

SEQ ID NO: 672 - protein, 7 aa, Artificial Sequence
  Representative cyclic modulating agent based on OB-cadherin cell adhesion recognition sequence
CVIDDKC

SEQ ID NO: 673 - protein, 7 aa, Artificial Sequence
  Representative cyclic modulating agent based on OB-cadherin cell adhesion recognition sequence
CIDDKSC

SEQ ID NO: 674 - protein, 8 aa, Artificial Sequence
  Representative cyclic modulating agent based on OB-cadherin cell adhesion recognition sequence
CVIDDKSC

SEQ ID NO: 675 - protein, 7 aa, Artificial Sequence
  Representative cyclic modulating agent based on OB-cadherin cell adhesion recognition sequence
CDDKSGC

SEQ ID NO: 676 - protein, 8 aa, Artificial Sequence
  Representative cyclic modulating agent based on OB-cadherin cell adhesion recognition sequence
CIDDKSGC

SEQ ID NO: 677 - protein, 9 aa, Artificial Sequence
  Representative cyclic modulating agent based on OB-cadherin cell adhesion recognition sequence
CVIDDKSGC

SEQ ID NO: 678 - protein, 8 aa, Artificial Sequence
  Representative cyclic modulating agent based on OB-cadherin cell adhesion recognition sequence
CFVIDDKC

SEQ ID NO: 679 - protein, 9 aa, Artificial Sequence
  Representative cyclic modulating agent based on OB-cadherin cell adhesion recognition sequence
CFVIDDKSC

SEQ ID NO: 680 - protein, 10 aa, Artificial Sequence
  Representative cyclic modulating agent based on OB-cadherin cell adhesion recognition sequence
CFVIDDKSGC

SEQ ID NO: 681 - protein, 9 aa, Artificial Sequence
  Representative cyclic modulating agent based on OB-cadherin cell adhesion recognition sequence
CIFVIDDKC

SEQ ID NO: 682 - protein, 10 aa, Artificial Sequence
  Representative cyclic modulating agent based on OB-cadherin cell adhesion recognition sequence
CIFVIDDKSC

SEQ ID NO: 683 - protein, 11 aa, Artificial Sequence
  Representative cyclic modulating agent based on OB-cadherin cell adhesion recognition sequence
CIFVIDDKSGC

SEQ ID NO: 684 - protein, 5 aa, Artificial Sequence
  Representative cyclic modulating agent based on OB-cadherin cell adhesion recognition sequence
DDDKK

SEQ ID NO: 685 - protein, 6 aa, Artificial Sequence
  Representative cyclic modulating agent based on OB-cadherin cell adhesion recognition sequence
DIDDKK

SEQ ID NO: 686 - protein, 7 aa, Artificial Sequence
  Representative cyclic modulating agent based on OB-cadherin cell adhesion recognition sequence
DVIDDKK

SEQ ID NO: 687 - protein, 8 aa, Artificial Sequence
  Representative cyclic modulating agent based on OB-cadherin cell adhesion recognition sequence
DFVIDDKK

SEQ ID NO: 688 - protein, 9 aa, Artificial Sequence
  Representative cyclic modulating agent based on OB-cadherin cell adhesion recognition sequence
DIFVIDDKK

SEQ ID NO: 689 - protein, 5 aa, Artificial Sequence
  Representative cyclic modulating agent based on OB-cadherin cell adhesion recognition sequence
EDDKK

SEQ ID NO: 690 - protein, 6 aa, Artificial Sequence
  Representative cyclic modulating agent based on OB-cadherin cell adhesion recognition sequence
EIDDKK

SEQ ID NO: 691 - protein, 7 aa, Artificial Sequence
  Representative cyclic modulating agent based on OB-cadherin cell adhesion recognition sequence
EVIDDKK

SEQ ID NO: 692 - protein, 8 aa, Artificial Sequence
  Representative cyclic modulating agent based on OB-cadherin cell adhesion recognition sequence
EFVIDDKK

SEQ ID NO: 693 - protein, 9 aa, Artificial Sequence
  Representative cyclic modulating agent based on OB-cadherin cell adhesion recognition sequence
EIFVIDDKK

SEQ ID NO: 694 - protein, 6 aa, Artificial Sequence
  Representative cyclic modulating agent based on OB-cadherin cell adhesion recognition sequence
FVIDDK

SEQ ID NO: 695 - protein, 7 aa, Artificial Sequence
  Representative cyclic modulating agent based on OB-cadherin cell adhesion recognition sequence
FVIDDKS

SEQ ID NO: 696 - protein, 8 aa, Artificial Sequence
  Representative cyclic modulating agent based on OB-cadherin cell adhesion recognition sequence
FVIDDKSG

SEQ ID NO: 697 - protein, 5 aa, Artificial Sequence
  Representative cyclic modulating agent based on OB-cadherin cell adhesion recognition sequence
KDDKD

SEQ ID NO: 698 - protein, 6 aa, Artificial Sequence
  Representative cyclic modulating agent based on OB-cadherin cell adhesion recognition sequence
KIDDKD

SEQ ID NO: 699 - protein, 6 aa, Artificial Sequence
  Representative cyclic modulating agent based on OB-cadherin cell adhesion recognition sequence
KDDKSD

SEQ ID NO: 700 - protein, 7 aa, Artificial Sequence
  Representative cyclic modulating agent based on OB-cadherin cell adhesion recognition sequence
KVIDDKD

SEQ ID NO: 701 - protein, 7 aa, Artificial Sequence
  Representative cyclic modulating agent based on OB-cadherin cell adhesion recognition sequence
KIDDKSD

SEQ ID NO: 702 - protein, 8 aa, Artificial Sequence
  Representative cyclic modulating agent based on OB-cadherin cell adhesion recognition sequence
KVIDDKSD

SEQ ID NO: 703 - protein, 7 aa, Artificial Sequence
  Representative cyclic modulating agent based on OB-cadherin cell adhesion recognition sequence
KDDKSGD

SEQ ID NO: 704 - protein, 8 aa, Artificial Sequence
  Representative cyclic modulating agent based on OB-cadherin cell adhesion recognition sequence
KIDDKSGD

SEQ ID NO: 705 - protein, 9 aa, Artificial Sequence
  Representative cyclic modulating agent based on OB-cadherin cell adhesion recognition sequence
KVIDDKSGD

SEQ ID NO: 706 - protein, 8 aa, Artificial Sequence
  Representative cyclic modulating agent based on OB-cadherin cell adhesion recognition sequence
KFVIDDKD

SEQ ID NO: 707 - protein, 9 aa, Artificial Sequence
  Representative cyclic modulating agent based on OB-cadherin cell adhesion recognition sequence
KFVIDDKSD

SEQ ID NO: 708 - protein, 10 aa, Artificial Sequence
  Representative cyclic modulating agent based on OB-cadherin cell adhesion recognition sequence
KFVIDDKSGD

SEQ ID NO: 709 - protein, 9 aa, Artificial Sequence
  Representative cyclic modulating agent based on OB-cadherin cell adhesion recognition sequence
KIFVIDDKD

SEQ ID NO: 710 - protein, 10 aa, Artificial Sequence
  Representative cyclic modulating agent based on OB-cadherin cell adhesion recognition sequence
KIFVIDDKSD

SEQ ID NO: 711 - protein, 11 aa, Artificial Sequence
  Representative cyclic modulating agent based on OB-cadherin cell adhesion recognition sequence
KIFVIDDKSGD

SEQ ID NO: 712 - protein, 5 aa, Artificial Sequence
  Representative cyclic modulating agent based on OB-cadherin cell adhesion recognition sequence
VIDDK

SEQ ID NO: 713 - protein, 5 aa, Artificial Sequence
  Representative cyclic modulating agent based on OB-cadherin cell adhesion recognition sequence
IDDKS

SEQ ID NO: 714 - protein, 6 aa, Artificial Sequence
  Representative cyclic modulating agent based on OB-cadherin cell adhesion recognition sequence
VIDDKS

SEQ ID NO: 715 - protein, 7 aa, Artificial Sequence
  Representative cyclic modulating agent based on OB-cadherin cell adhesion recognition sequence
VIDDKSG

SEQ ID NO: 716 - protein, 5 aa, Artificial Sequence
  Representative cyclic modulating agent based on OB-cadherin cell adhesion recognition sequence
DDKSG

SEQ ID NO: 717 - protein, 6 aa, Artificial Sequence
  Representative cyclic modulating agent based on OB-cadherin cell adhesion recognition sequence
IDDKSG

SEQ ID NO: 718 - protein, 7 aa, Artificial Sequence
  Representative cyclic modulating agent based on OB-cadherin cell adhesion recognition sequence
IFVIDDK

SEQ ID NO: 719 - protein, 8 aa, Artificial Sequence
  Representative cyclic modulating agent based on OB-cadherin cell adhesion recognition sequence
IFVIDDKS

SEQ ID NO: 720 - protein, 9 aa, Artificial Sequence
  Representative cyclic modulating agent based on OB-cadherin cell adhesion recognition sequence
IFVIDDKSG

SEQ ID NO: 721 - protein, 5 aa, Artificial Sequence
  Representative cyclic modulating agent based on OB-cadherin cell adhesion recognition sequence
KDDKE

SEQ ID NO: 722 - protein, 6 aa, Artificial Sequence
  Representative cyclic modulating agent based on OB-cadherin cell adhesion recognition sequence
KIDDKE

SEQ ID NO: 723 - protein, 6 aa, Artificial Sequence
  Representative cyclic modulating agent based on OB-cadherin cell adhesion recognition sequence
KDDKSE

SEQ ID NO: 724 - protein, 7 aa, Artificial Sequence
  Representative cyclic modulating agent based on OB-cadherin cell adhesion recognition sequence
KVIDDKE

SEQ ID NO: 725 - protein, 7 aa, Artificial Sequence
  Representative cyclic modulating agent based on OB-cadherin cell adhesion recognition sequence
KIDDKSE

SEQ ID NO: 726 - protein, 8 aa, Artificial Sequence
  Representative cyclic modulating agent based on OB-cadherin cell adhesion recognition sequence
KVIDDKSE

SEQ ID NO: 727 - protein, 7 aa, Artificial Sequence
  Representative cyclic modulating agent based on OB-cadherin cell adhesion recognition sequence
KDDKSGE

SEQ ID NO: 728 - protein, 8 aa, Artificial Sequence
  Representative cyclic modulating agent based on OB-cadherin cell adhesion recognition sequence
KIDDKSGE

SEQ ID NO: 729 - protein, 9 aa, Artificial Sequence
  Representative cyclic modulating agent based on OB-cadherin cell adhesion recognition sequence
KVIDDKSGE

SEQ ID NO: 730 - protein, 8 aa, Artificial Sequence
  Representative cyclic modulating agent based on OB-cadherin cell adhesion recognition sequence
KFVIDDKE

SEQ ID NO: 731 - protein, 9 aa, Artificial Sequence
  Representative cyclic modulating agent based on OB-cadherin cell adhesion recognition sequence
KFVIDDKSE

SEQ ID NO: 732 - protein, 10 aa, Artificial Sequence
  Representative cyclic modulating agent based on OB-cadherin cell adhesion recognition sequence
KFVIDDKSGE

SEQ ID NO: 733 - protein, 9 aa, Artificial Sequence
  Representative cyclic modulating agent based on OB-cadherin cell adhesion recognition sequence
KIFVIDDKE

SEQ ID NO: 734 - protein, 10 aa, Artificial Sequence
  Representative cyclic modulating agent based on OB-cadherin cell adhesion recognition sequence
KIFVIDDKSE

SEQ ID NO: 735 - protein, 11 aa, Artificial Sequence
  Representative cyclic modulating agent based on OB-cadherin cell adhesion recognition sequence
KIFVIDDKSGE

SEQ ID NO: 736 - protein, 5 aa, Artificial Sequence
  Representative cyclic modulating agent based on OB-cadherin cell adhesion recognition sequence
CEEYC

SEQ ID NO: 737 - protein, 6 aa, Artificial Sequence
  Representative cyclic modulating agent based on OB-cadherin cell adhesion recognition sequence
CIEEYC

SEQ ID NO: 738 - protein, 6 aa, Artificial Sequence
  Representative cyclic modulating agent based on OB-cadherin cell adhesion recognition sequence
CEEYTC

SEQ ID NO: 739 - protein, 7 aa, Artificial Sequence
  Representative cyclic modulating agent based on OB-cadherin cell adhesion recognition sequence
CVIEEYC

SEQ ID NO: 740 - protein, 7 aa, Artificial Sequence
  Representative cyclic modulating agent based on OB-cadherin cell adhesion recognition sequence
CIEEYTC

SEQ ID NO: 741 - protein, 8 aa, Artificial Sequence
  Representative cyclic modulating agent based on OB-cadherin cell adhesion recognition sequence
CVIEEYTC

SEQ ID NO: 742 - protein, 7 aa, Artificial Sequence
  Representative cyclic modulating agent based on OB-cadherin cell adhesion recognition sequence
CEEYTGC

SEQ ID NO: 743 - protein, 8 aa, Artificial Sequence
  Representative cyclic modulating agent based on OB-cadherin cell adhesion recognition sequence
CIEEYTGC

SEQ ID NO: 744 - protein, 9 aa, Artificial Sequence
  Representative cyclic modulating agent based on OB-cadherin cell adhesion recognition sequence
CVIEEYTGC

SEQ ID NO: 745 - protein, 8 aa, Artificial Sequence
  Representative cyclic modulating agent based on OB-cadherin cell adhesion recognition sequence
CFVIEEYC

SEQ ID NO: 746 - protein, 9 aa, Artificial Sequence
  Representative cyclic modulating agent based on OB-cadherin cell adhesion recognition sequence
CFVIEEYTC

SEQ ID NO: 747 - protein, 10 aa, Artificial Sequence
  Representative cyclic modulating agent based on OB-cadherin cell adhesion recognition sequence
CFVIEEYTGC

SEQ ID NO: 748 - protein, 9 aa, Artificial Sequence
  Representative cyclic modulating agent based on OB-cadherin cell adhesion recognition sequence
CFFVIEEYC

SEQ ID NO: 749 - protein, 10 aa, Artificial Sequence
  Representative cyclic modulating agent based on OB-cadherin cell adhesion recognition sequence
CFFVIEEYTC

SEQ ID NO: 750 - protein, 11 aa, Artificial Sequence
  Representative cyclic modulating agent based on OB-cadherin cell adhesion recognition sequence
CFFVIEEYTGC

SEQ ID NO: 751 - protein, 5 aa, Artificial Sequence
  Representative cyclic modulating agent based on OB-cadherin cell adhesion recognition sequence
KEEYD

SEQ ID NO: 752 - protein, 6 aa, Artificial Sequence
  Representative cyclic modulating agent based on OB-cadherin cell adhesion recognition sequence
KIEEYD

SEQ ID NO: 753 - protein, 6 aa, Artificial Sequence
  Representative cyclic modulating agent based on OB-cadherin cell adhesion recognition sequence
KEEYTD

SEQ ID NO: 754 - protein, 7 aa, Artificial Sequence
  Representative cyclic modulating agent based on OB-cadherin cell adhesion recognition sequence
KVIEEYD

SEQ ID NO: 755 - protein, 7 aa, Artificial Sequence
  Representative cyclic modulating agent based on OB-cadherin cell adhesion recognition sequence
KIEEYTD

SEQ ID NO: 756 - protein, 8 aa, Artificial Sequence
  Representative cyclic modulating agent based on OB-cadherin cell adhesion recognition sequence
KVIEEYTD

SEQ ID NO: 757 - protein, 8 aa, Artificial Sequence
  Representative cyclic modulating agent based on OB-cadherin cell adhesion recognition sequence
KEEYTGCD

SEQ ID NO: 758 - protein, 8 aa, Artificial Sequence
  Representative cyclic modulating agent based on OB-cadherin cell adhesion recognition sequence
KIEEYTGD

SEQ ID NO: 759 - protein, 9 aa, Artificial Sequence
  Representative cyclic modulating agent based on OB-cadherin cell adhesion recognition sequence
KVIEEYTGD

SEQ ID NO: 760 - protein, 8 aa, Artificial Sequence
  Representative cyclic modulating agent based on OB-cadherin cell adhesion recognition sequence
KFVIEEYD

SEQ ID NO: 761 - protein, 9 aa, Artificial Sequence
  Representative cyclic modulating agent based on OB-cadherin cell adhesion recognition sequence
KFVIEEYTD

SEQ ID NO: 762 - protein, 10 aa, Artificial Sequence
  Representative cyclic modulating agent based on OB-cadherin cell adhesion recognition sequence
KFVIEEYTGD

SEQ ID NO: 763 - protein, 9 aa, Artificial Sequence
  Representative cyclic modulating agent based on OB-cadherin cell adhesion recognition sequence
KFFVIEEYD

SEQ ID NO: 764 - protein, 10 aa, Artificial Sequence
  Representative cyclic modulating agent based on OB-cadherin cell adhesion recognition sequence
KFFVIEEYTD

SEQ ID NO: 765 - protein, 11 aa, Artificial Sequence
  Representative cyclic modulating agent based on OB-cadherin cell adhesion recognition sequence
KFFVIEEYTGD

SEQ ID NO: 766 - protein, 5 aa, Artificial Sequence
  Representative cyclic modulating agent based on OB-cadherin cell adhesion recognition sequence
EEEYK

SEQ ID NO: 767 - protein, 6 aa, Artificial Sequence
  Representative cyclic modulating agent based on OB-cadherin cell adhesion recognition sequence
EIEEYK

SEQ ID NO: 768 - protein, 6 aa, Artificial Sequence
  Representative cyclic modulating agent based on OB-cadherin cell adhesion recognition sequence
EEEYTK

SEQ ID NO: 769 - protein, 7 aa, Artificial Sequence
  Representative cyclic modulating agent based on OB-cadherin cell adhesion recognition sequence
EVIEEYK

SEQ ID NO: 770 - protein, 7 aa, Artificial Sequence
  Representative cyclic modulating agent based on OB-cadherin cell adhesion recognition sequence
EIEEYTK

SEQ ID NO: 771 - protein, 8 aa, Artificial Sequence
  Representative cyclic modulating agent based on OB-cadherin cell adhesion recognition sequence
EVIEEYTK

SEQ ID NO: 772 - protein, 7 aa, Artificial Sequence
  Representative cyclic modulating agent based on OB-cadherin cell adhesion recognition sequence
EEEYTGK

SEQ ID NO: 773 - protein, 8 aa, Artificial Sequence
  Representative cyclic modulating agent based on OB-cadherin cell adhesion recognition sequence
EIEEYTGK

SEQ ID NO: 774 - protein, 9 aa, Artificial Sequence
  Representative cyclic modulating agent based on OB-cadherin cell adhesion recognition sequence
EVIEEYTGK

SEQ ID NO: 775 - protein, 8 aa, Artificial Sequence
  Representative cyclic modulating agent based on OB-cadherin cell adhesion recognition sequence
EFVIEEYK

SEQ ID NO: 776 - protein, 9 aa, Artificial Sequence
  Representative cyclic modulating agent based on OB-cadherin cell adhesion recognition sequence
EFVIEEYTK

SEQ ID NO: 777 - protein, 10 aa, Artificial Sequence
  Representative cyclic modulating agent based on OB-cadherin cell adhesion recognition sequence
EFVIEEYTGK

SEQ ID NO: 778 - protein, 9 aa, Artificial Sequence
  Representative cyclic modulating agent based on OB-cadherin cell adhesion recognition sequence
EFFVIEEYK

SEQ ID NO: 779 - protein, 10 aa, Artificial Sequence
  Representative cyclic modulating agent based on OB-cadherin cell adhesion recognition sequence
EFFVIEEYTK

SEQ ID NO: 780 - protein, 11 aa, Artificial Sequence
  Representative cyclic modulating agent based on OB-cadherin cell adhesion recognition sequence
EFFVIEEYTGK

SEQ ID NO: 781 - protein, 6 aa, Artificial Sequence
  Representative cyclic modulating agent based on OB-cadherin cell adhesion recognition sequence
DCEEYK

SEQ ID NO: 782 - protein, 7 aa, Artificial Sequence
  Representative cyclic modulating agent based on OB-cadherin cell adhesion recognition sequence
DIEEYCK

SEQ ID NO: 783 - protein, 6 aa, Artificial Sequence
  Representative cyclic modulating agent based on OB-cadherin cell adhesion recognition sequence
DEEYTK

SEQ ID NO: 784 - protein, 7 aa, Artificial Sequence
  Representative cyclic modulating agent based on OB-cadherin cell adhesion recognition sequence
DVIEEYK

SEQ ID NO: 785 - protein, 7 aa, Artificial Sequence
  Representative cyclic modulating agent based on OB-cadherin cell adhesion recognition sequence
DIEEYTK

SEQ ID NO: 786 - protein, 8 aa, Artificial Sequence
  Representative cyclic modulating agent based on OB-cadherin cell adhesion recognition sequence
DVIEEYTK

SEQ ID NO: 787 - protein, 7 aa, Artificial Sequence
  Representative cyclic modulating agent based on OB-cadherin cell adhesion recognition sequence
DEEYTGK

SEQ ID NO: 788 - protein, 8 aa, Artificial Sequence
  Representative cyclic modulating agent based on OB-cadherin cell adhesion recognition sequence
DIEEYTGK

SEQ ID NO: 789 - protein, 9 aa, Artificial Sequence
  Representative cyclic modulating agent based on OB-cadherin cell adhesion recognition sequence
DVIEEYTGK

SEQ ID NO: 790 - protein, 8 aa, Artificial Sequence
  Representative cyclic modulating agent based on OB-cadherin cell adhesion recognition sequence
DFVIEEYK

SEQ ID NO: 791 - protein, 9 aa, Artificial Sequence
  Representative cyclic modulating agent based on OB-cadherin cell adhesion recognition sequence
DFVIEEYTK

SEQ ID NO: 792 - protein, 10 aa, Artificial Sequence
  Representative cyclic modulating agent based on OB-cadherin cell adhesion recognition sequence
DFVIEEYTGK

SEQ ID NO: 793 - protein, 9 aa, Artificial Sequence
  Representative cyclic modulating agent based on OB-cadherin cell adhesion recognition sequence
DFFVIEEYK

SEQ ID NO: 794 - protein, 10 aa, Artificial Sequence
  Representative cyclic modulating agent based on OB-cadherin cell adhesion recognition sequence
DFFVIEEYTK

SEQ ID NO: 795 - protein, 11 aa, Artificial Sequence
  Representative cyclic modulating agent based on OB-cadherin cell adhesion recognition sequence
DFFVIEEYTGK

SEQ ID NO: 796 - protein, 5 aa, Artificial Sequence
  Representative cyclic modulating agent based on OB-cadherin cell adhesion recognition sequence
KEEYE

SEQ ID NO: 797 - protein, 6 aa, Artificial Sequence
  Representative cyclic modulating agent based on OB-cadherin cell adhesion recognition sequence
KIEEYE

SEQ ID NO: 798 - protein, 6 aa, Artificial Sequence
  Representative cyclic modulating agent based on OB-cadherin cell adhesion recognition sequence
KEEYTE

SEQ ID NO: 799 - protein, 7 aa, Artificial Sequence
  Representative cyclic modulating agent based on OB-cadherin cell adhesion recognition sequence
KVIEEYE

SEQ ID NO: 800 - protein, 7 aa, Artificial Sequence
  Representative cyclic modulating agent based on OB-cadherin cell adhesion recognition sequence
KIEEYTE

SEQ ID NO: 801 - protein, 8 aa, Artificial Sequence
  Representative cyclic modulating agent based on OB-cadherin cell adhesion recognition sequence
KVIEEYTE

SEQ ID NO: 802 - protein, 7 aa, Artificial Sequence
  Representative cyclic modulating agent based on OB-cadherin cell adhesion recognition sequence
KEEYTGE

SEQ ID NO: 803 - protein, 8 aa, Artificial Sequence
  Representative cyclic modulating agent based on OB-cadherin cell adhesion recognition sequence
KIEEYTGE

SEQ ID NO: 804 - protein, 9 aa, Artificial Sequence
  Representative cyclic modulating agent based on OB-cadherin cell adhesion recognition sequence
KVIEEYTGE

SEQ ID NO: 805 - protein, 8 aa, Artificial Sequence
  Representative cyclic modulating agent based on OB-cadherin cell adhesion recognition sequence
KFVIEEYE

SEQ ID NO: 806 - protein, 9 aa, Artificial Sequence
  Representative cyclic modulating agent based on OB-cadherin cell adhesion recognition sequence
KFVIEEYTE

SEQ ID NO: 807 - protein, 10 aa, Artificial Sequence
  Representative cyclic modulating agent based on OB-cadherin cell adhesion recognition sequence
KFVIEEYTGE

SEQ ID NO: 808 - protein, 9 aa, Artificial Sequence
  Representative cyclic modulating agent based on OB-cadherin cell adhesion recognition sequence
KFFVIEEYE

SEQ ID NO: 809 - protein, 10 aa, Artificial Sequence
  Representative cyclic modulating agent based on OB-cadherin cell adhesion recognition sequence
KFFVIEEYTE

SEQ ID NO: 810 - protein, 11 aa, Artificial Sequence
  Representative cyclic modulating agent based on OB-cadherin cell adhesion recognition sequence
KFFVIEEYTGE

SEQ ID NO: 811 - protein, 5 aa, Artificial Sequence
  Representative cyclic modulating agent based on OB-cadherin cell adhesion recognition sequence
VIEEY

SEQ ID NO: 812 - protein, 5 aa, Artificial Sequence
  Representative cyclic modulating agent based on OB-cadherin cell adhesion recognition sequence
IEEYT

SEQ ID NO: 813 - protein, 6 aa, Artificial Sequence
  Representative cyclic modulating agent based on OB-cadherin cell adhesion recognition sequence
VIEEYT

SEQ ID NO: 814 - protein, 5 aa, Artificial Sequence
  Representative cyclic modulating agent based on OB-cadherin cell adhesion recognition sequence
EEYTG

SEQ ID NO: 815 - protein, 6 aa, Artificial Sequence
  Representative cyclic modulating agent based on OB-cadherin cell adhesion recognition sequence
IEEYTG

SEQ ID NO: 816 - protein, 7 aa, Artificial Sequence
  Representative cyclic modulating agent based on OB-cadherin cell adhesion recognition sequence
VIEEYTG

SEQ ID NO: 817 - protein, 6 aa, Artificial Sequence
  Representative cyclic modulating agent based on OB-cadherin cell adhesion recognition sequence
FVIEEY

SEQ ID NO: 818 - protein, 7 aa, Artificial Sequence
  Representative cyclic modulating agent based on OB-cadherin cell adhesion recognition sequence
FVIEEYT

SEQ ID NO: 819 - protein, 8 aa, Artificial Sequence
  Representative cyclic modulating agent based on OB-cadherin cell adhesion recognition sequence
FVIEEYTG

SEQ ID NO: 820 - protein, 7 aa, Artificial Sequence
  Representative cyclic modulating agent based on OB-cadherin cell adhesion recognition sequence
FFVIEEY

SEQ ID NO: 821 - protein, 8 aa, Artificial Sequence
  Representative cyclic modulating agent based on OB-cadherin cell adhesion recognition sequence
FFVIEEYT

SEQ ID NO: 822 - protein, 9 aa, Artificial Sequence
  Representative cyclic modulating agent based on OB-cadherin cell adhesion recognition sequence
FFVIEEYTG

SEQ ID NO: 823 - protein, 5 aa, Artificial Sequence
  Representative cyclic modulating agent based on OB-cadherin cell adhesion recognition sequence
CEAQC

SEQ ID NO: 824 - protein, 6 aa, Artificial Sequence
  Representative cyclic modulating agent based on OB-cadherin cell adhesion recognition sequence
CVEAQC

SEQ ID NO: 825 - protein, 6 aa, Artificial Sequence
  Representative cyclic modulating agent based on OB-cadherin cell adhesion recognition sequence
CEAQTC

SEQ ID NO: 826 - protein, 7 aa, Artificial Sequence
  Representative cyclic modulating agent based on OB-cadherin cell adhesion recognition sequence
CSVEAQC

SEQ ID NO: 827 - protein, 7 aa, Artificial Sequence
  Representative cyclic modulating agent based on OB-cadherin cell adhesion recognition sequence
CVEAQTC

SEQ ID NO: 828 - protein, 8 aa, Artificial Sequence
  Representative cyclic modulating agent based on OB-cadherin cell adhesion recognition sequence
CSVEAQTC

SEQ ID NO: 829 - protein, 7 aa, Artificial Sequence
  Representative cyclic modulating agent based on OB-cadherin cell adhesion recognition sequence
CEAQTGC

SEQ ID NO: 830 - protein, 8 aa, Artificial Sequence
  Representative cyclic modulating agent based on OB-cadherin cell adhesion recognition sequence
CVEAQTGC

SEQ ID NO: 831 - protein, 9 aa, Artificial Sequence
  Representative cyclic modulating agent based on OB-cadherin cell adhesion recognition sequence
CSVEAQTGC

SEQ ID NO: 832 - protein, 8 aa, Artificial Sequence
  Representative cyclic modulating agent based on OB-cadherin cell adhesion recognition sequence
CFSVEAQC

SEQ ID NO: 833 - protein, 9 aa, Artificial Sequence
  Representative cyclic modulating agent based on OB-cadherin cell adhesion recognition sequence
CFSVEAQTC

SEQ ID NO: 834 - protein, 10 aa, Artificial Sequence
  Representative cyclic modulating agent based on OB-cadherin cell adhesion recognition sequence
CFSVEAQTGC

SEQ ID NO: 835 - protein, 9 aa, Artificial Sequence
  Representative cyclic modulating agent based on OB-cadherin cell adhesion recognition sequence
CYFSVEAQC

SEQ ID NO: 836 - protein, 10 aa, Artificial Sequence
  Representative cyclic modulating agent based on OB-cadherin cell adhesion recognition sequence
CYFSVEAQTC

SEQ ID NO: 837 - protein, 11 aa, Artificial Sequence
  Representative cyclic modulating agent based on OB-cadherin cell adhesion recognition sequence
CYFSVEAQTGC

SEQ ID NO: 838 - protein, 5 aa, Artificial Sequence
  Representative cyclic modulating agent based on OB-cadherin cell adhesion recognition sequence
KEAQD

SEQ ID NO: 839 - protein, 6 aa, Artificial Sequence
  Representative cyclic modulating agent based on OB-cadherin cell adhesion recognition sequence
KVEAQD

SEQ ID NO: 840 - protein, 6 aa, Artificial Sequence
  Representative cyclic modulating agent based on OB-cadherin cell adhesion recognition sequence
KEAQTD

SEQ ID NO: 841 - protein, 7 aa, Artificial Sequence
  Representative cyclic modulating agent based on OB-cadherin cell adhesion recognition sequence
KSVEAQD

SEQ ID NO: 842 - protein, 7 aa, Artificial Sequence
  Representative cyclic modulating agent based on OB-cadherin cell adhesion recognition sequence
KVEAQTD

SEQ ID NO: 843 - protein, 8 aa, Artificial Sequence
  Representative cyclic modulating agent based on OB-cadherin cell adhesion recognition sequence
KSVEAQTD

SEQ ID NO: 844 - protein, 7 aa, Artificial Sequence
  Representative cyclic modulating agent based on OB-cadherin cell adhesion recognition sequence
KEAQTGD

SEQ ID NO: 845 - protein, 8 aa, Artificial Sequence
  Representative cyclic modulating agent based on OB-cadherin cell adhesion recognition sequence
KVEAQTGD

SEQ ID NO: 846 - protein, 9 aa, Artificial Sequence
  Representative cyclic modulating agent based on OB-cadherin cell adhesion recognition sequence
KSVEAQTGD

SEQ ID NO: 847 - protein, 8 aa, Artificial Sequence
  Representative cyclic modulating agent based on OB-cadherin cell adhesion recognition sequence
KFSVEAQD

SEQ ID NO: 848 - protein, 9 aa, Artificial Sequence
  Representative cyclic modulating agent based on OB-cadherin cell adhesion recognition sequence
KFSVEAQTD

SEQ ID NO: 849 - protein, 10 aa, Artificial Sequence
  Representative cyclic modulating agent based on OB-cadherin cell adhesion recognition sequence
KFSVEAQTGD

SEQ ID NO: 850 - protein, 9 aa, Artificial Sequence
  Representative cyclic modulating agent based on OB-cadherin cell adhesion recognition sequence
KYFSVEAQD

SEQ ID NO: 851 - protein, 10 aa, Artificial Sequence
  Representative cyclic modulating agent based on OB-cadherin cell adhesion recognition sequence
KYFSVEAQTD

SEQ ID NO: 852 - protein, 11 aa, Artificial Sequence
  Representative cyclic modulating agent based on OB-cadherin cell adhesion recognition sequence
KYFSVEAQTGD

SEQ ID NO: 853 - protein, 5 aa, Artificial Sequence
  Representative cyclic modulating agent based on OB-cadherin cell adhesion recognition sequence
EEAQK

SEQ ID NO: 854 - protein, 6 aa, Artificial Sequence
  Representative cyclic modulating agent based on OB-cadherin cell adhesion recognition sequence
EVEAQK

SEQ ID NO: 855 - protein, 6 aa, Artificial Sequence
  Representative cyclic modulating agent based on OB-cadherin cell adhesion recognition sequence
EEAQTK

SEQ ID NO: 856 - protein, 7 aa, Artificial Sequence
  Representative cyclic modulating agent based on OB-cadherin cell adhesion recognition sequence
ESVEAQK

SEQ ID NO: 857 - protein, 7 aa, Artificial Sequence
  Representative cyclic modulating agent based on OB-cadherin cell adhesion recognition sequence
EVEAQTK

SEQ ID NO: 858 - protein, 8 aa, Artificial Sequence
  Representative cyclic modulating agent based on OB-cadherin cell adhesion recognition sequence
ESVEAQTK

SEQ ID NO: 859 - protein, 7 aa, Artificial Sequence
  Representative cyclic modulating agent based on OB-cadherin cell adhesion recognition sequence
EEAQTGK

SEQ ID NO: 860 - protein, 8 aa, Artificial Sequence
  Representative cyclic modulating agent based on OB-cadherin cell adhesion recognition sequence
EVEAQTGK

SEQ ID NO: 861 - protein, 9 aa, Artificial Sequence
  Representative cyclic modulating agent based on OB-cadherin cell adhesion recognition sequence
ESVEAQTGK

SEQ ID NO: 862 - protein, 8 aa, Artificial Sequence
  Representative cyclic modulating agent based on OB-cadherin cell adhesion recognition sequence
EFSVEAQK

SEQ ID NO: 863 - protein, 9 aa, Artificial Sequence
  Representative cyclic modulating agent based on OB-cadherin cell adhesion recognition sequence
EFSVEAQTK

SEQ ID NO: 864 - protein, 10 aa, Artificial Sequence
  Representative cyclic modulating agent based on OB-cadherin cell adhesion recognition sequence
EFSVEAQTGK

SEQ ID NO: 865 - protein, 9 aa, Artificial Sequence
  Representative cyclic modulating agent based on OB-cadherin cell adhesion recognition sequence
EYFSVEAQK

SEQ ID NO: 866 - protein, 10 aa, Artificial Sequence
  Representative cyclic modulating agent based on OB-cadherin cell adhesion recognition sequence
EYFSVEAQTK

SEQ ID NO: 867 - protein, 11 aa, Artificial Sequence
  Representative cyclic modulating agent based on OB-cadherin cell adhesion recognition sequence
EYFSVEAQTGK

SEQ ID NO: 868 - protein, 5 aa, Artificial Sequence
  Representative cyclic modulating agent based on OB-cadherin cell adhesion recognition sequence
DEAQK

SEQ ID NO: 869 - protein, 6 aa, Artificial Sequence
  Representative cyclic modulating agent based on OB-cadherin cell adhesion recognition sequence
DVEAQK

SEQ ID NO: 870 - protein, 6 aa, Artificial Sequence
  Representative cyclic modulating agent based on OB-cadherin cell adhesion recognition sequence
DEAQTK

SEQ ID NO: 871 - protein, 7 aa, Artificial Sequence
  Representative cyclic modulating agent based on OB-cadherin cell adhesion recognition sequence
DSVEAQK

SEQ ID NO: 872 - protein, 7 aa, Artificial Sequence
  Representative cyclic modulating agent based on OB-cadherin cell adhesion recognition sequence
DVEAQTK

SEQ ID NO: 873 - protein, 8 aa, Artificial Sequence
  Representative cyclic modulating agent based on OB-cadherin cell adhesion recognition sequence
DSVEAQTK

SEQ ID NO: 874 - protein, 7 aa, Artificial Sequence
  Representative cyclic modulating agent based on OB-cadherin cell adhesion recognition sequence
DEAQTGK

SEQ ID NO: 875 - protein, 8 aa, Artificial Sequence
  Representative cyclic modulating agent based on OB-cadherin cell adhesion recognition sequence
DVEAQTGK

SEQ ID NO: 876 - protein, 9 aa, Artificial Sequence
  Representative cyclic modulating agent based on OB-cadherin cell adhesion recognition sequence
DSVEAQTGK

SEQ ID NO: 877 - protein, 8 aa, Artificial Sequence
  Representative cyclic modulating agent based on OB-cadherin cell adhesion recognition sequence
DFSVEAQK

SEQ ID NO: 878 - protein, 9 aa, Artificial Sequence
  Representative cyclic modulating agent based on OB-cadherin cell adhesion recognition sequence
DFSVEAQTK

SEQ ID NO: 879 - protein, 10 aa, Artificial Sequence
  Representative cyclic modulating agent based on OB-cadherin cell adhesion recognition sequence
DFSVEAQTGK

SEQ ID NO: 880 - protein, 9 aa, Artificial Sequence
  Representative cyclic modulating agent based on OB-cadherin cell adhesion recognition sequence
DYFSVEAQK

SEQ ID NO: 881 - protein, 10 aa, Artificial Sequence
  Representative cyclic modulating agent based on OB-cadherin cell adhesion recognition sequence
DYFSVEAQTK

SEQ ID NO: 882 - protein, 11 aa, Artificial Sequence
  Representative cyclic modulating agent based on OB-cadherin cell adhesion recognition sequence
DYFSVEAQTGK

SEQ ID NO: 883 - protein, 5 aa, Artificial Sequence
  Representative cyclic modulating agent based on OB-cadherin cell adhesion recognition sequence
KEAQE

SEQ ID NO: 884 - protein, 6 aa, Artificial Sequence
  Representative cyclic modulating agent based on OB-cadherin cell adhesion recognition sequence
KVEAQE

SEQ ID NO: 885 - protein, 6 aa, Artificial Sequence
  Representative cyclic modulating agent based on OB-cadherin cell adhesion recognition sequence
KEAQTE

SEQ ID NO: 886 - protein, 7 aa, Artificial Sequence
  Representative cyclic modulating agent based on OB-cadherin cell adhesion recognition sequence
KSVEAQE

SEQ ID NO: 887 - protein, 7 aa, Artificial Sequence
  Representative cyclic modulating agent based on OB-cadherin cell adhesion recognition sequence
KVEAQTE

SEQ ID NO: 888 - protein, 8 aa, Artificial Sequence
  Representative cyclic modulating agent based on OB-cadherin cell adhesion recognition sequence
KSVEAQTE

SEQ ID NO: 889 - protein, 7 aa, Artificial Sequence
  Representative cyclic modulating agent based on OB-cadherin cell adhesion recognition sequence
KEAQTGE

SEQ ID NO: 890 - protein, 8 aa, Artificial Sequence
  Representative cyclic modulating agent based on OB-cadherin cell adhesion recognition sequence
KVEAQTGE

SEQ ID NO: 891 - protein, 9 aa, Artificial Sequence
  Representative cyclic modulating agent based on OB-cadherin cell adhesion recognition sequence
KSVEAQTGE

SEQ ID NO: 892 - protein, 8 aa, Artificial Sequence
  Representative cyclic modulating agent based on OB-cadherin cell adhesion recognition sequence
KFSVEAQE

SEQ ID NO: 893 - protein, 9 aa, Artificial Sequence
  Representative cyclic modulating agent based on OB-cadherin cell adhesion recognition sequence
KFSVEAQTE

SEQ ID NO: 894 - protein, 10 aa, Artificial Sequence
  Representative cyclic modulating agent based on OB-cadherin cell adhesion recognition sequence
KFSVEAQTGE

SEQ ID NO: 895 - protein, 9 aa, Artificial Sequence
  Representative cyclic modulating agent based on OB-cadherin cell adhesion recognition sequence
KYFSVEAQE

SEQ ID NO: 896 - protein, 10 aa, Artificial Sequence
  Representative cyclic modulating agent based on OB-cadherin cell adhesion recognition sequence
KYFSVEAQTE

SEQ ID NO: 897 - protein, 11 aa, Artificial Sequence
  Representative cyclic modulating agent based on OB-cadherin cell adhesion recognition sequence
KYFSVEAQTGE

SEQ ID NO: 898 - protein, 5 aa, Artificial Sequence
  Representative cyclic modulating agent based on OB-cadherin cell adhesion recognition sequence
SVEAQ

SEQ ID NO: 899 - protein, 5 aa, Artificial Sequence
  Representative cyclic modulating agent based on OB-cadherin cell adhesion recognition sequence
VEAQT

SEQ ID NO: 900 - protein, 6 aa, Artificial Sequence
  Representative cyclic modulating agent based on OB-cadherin cell adhesion recognition sequence
SVEAQT

SEQ ID NO: 901 - protein, 5 aa, Artificial Sequence
  Representative cyclic modulating agent based on OB-cadherin cell adhesion recognition sequence
EAQTG

SEQ ID NO: 902 - protein, 6 aa, Artificial Sequence
  Representative cyclic modulating agent based on OB-cadherin cell adhesion recognition sequence
VEAQTG

SEQ ID NO: 903 - protein, 7 aa, Artificial Sequence
  Representative cyclic modulating agent based on OB-cadherin cell adhesion recognition sequence
SVEAQTG

SEQ ID NO: 904 - protein, 6 aa, Artificial Sequence
  Representative cyclic modulating agent based on OB-cadherin cell adhesion recognition sequence
FSVEAQ

SEQ ID NO: 905 - protein, 7 aa, Artificial Sequence
  Representative cyclic modulating agent based on OB-cadherin cell adhesion recognition sequence
FSVEAQT

SEQ ID NO: 906 - protein, 8 aa, Artificial Sequence
  Representative cyclic modulating agent based on OB-cadherin cell adhesion recognition sequence
FSVEAQTG

SEQ ID NO: 907 - protein, 7 aa, Artificial Sequence
  Representative cyclic modulating agent based on OB-cadherin cell adhesion recognition sequence
YFSVEAQ

SEQ ID NO: 908 - protein, 8 aa, Artificial Sequence
  Representative cyclic modulating agent based on OB-cadherin cell adhesion recognition sequence
YFSVEAQT

SEQ ID NO: 909 - protein, 9 aa, Artificial Sequence
  Representative cyclic modulating agent based on OB-cadherin cell adhesion recognition sequence
YFSVEAQTG

SEQ ID NO: 910 - protein, 5 aa, Artificial Sequence
  Representative cyclic modulating agent based on cadherin-5 cell adhesion recognition sequence
CDAEC

SEQ ID NO: 911 - protein, 6 aa, Artificial Sequence
  Representative cyclic modulating agent based on cadherin-5 cell adhesion recognition sequence
CVDAEC

SEQ ID NO: 912 - protein, 6 aa, Artificial Sequence
  Representative cyclic modulating agent based on cadherin-5 cell adhesion recognition sequence
CDAETC

SEQ ID NO: 913 - protein, 7 aa, Artificial Sequence
  Representative cyclic modulating agent based on cadherin-5 cell adhesion recognition sequence
CRVDAEC

SEQ ID NO: 914 - protein, 7 aa, Artificial Sequence
  Representative cyclic modulating agent based on cadherin-5 cell adhesion recognition sequence
CVDAETC

SEQ ID NO: 915 - protein, 8 aa, Artificial Sequence
  Representative cyclic modulating agent based on cadherin-5 cell adhesion recognition sequence
CRVDAETC

SEQ ID NO: 916 - protein, 7 aa, Artificial Sequence
  Representative cyclic modulating agent based on cadherin-5 cell adhesion recognition sequence
CDAETGC

SEQ ID NO: 917 - protein, 8 aa, Artificial Sequence
  Representative cyclic modulating agent based on cadherin-5 cell adhesion recognition sequence
CCDAETGC

SEQ ID NO: 918 - protein, 9 aa, Artificial Sequence
  Representative cyclic modulating agent based on cadherin-5 cell adhesion recognition sequence
CRVDAETGC

SEQ ID NO: 919 - protein, 8 aa, Artificial Sequence
  Representative cyclic modulating agent based on cadherin-5 cell adhesion recognition sequence
CFRVDAEC

SEQ ID NO: 920 - protein, 9 aa, Artificial Sequence
  Representative cyclic modulating agent based on cadherin-5 cell adhesion recognition sequence
CFRVDAETC

SEQ ID NO: 921 - protein, 10 aa, Artificial Sequence
  Representative cyclic modulating agent based on cadherin-5 cell adhesion recognition sequence
CFRVDAETGC

SEQ ID NO: 922 - protein, 9 aa, Artificial Sequence
  Representative cyclic modulating agent based on cadherin-5 cell adhesion recognition sequence
CVFRVDAEC

SEQ ID NO: 923 - protein, 10 aa, Artificial Sequence
  Representative cyclic modulating agent based on cadherin-5 cell adhesion recognition sequence
CVFRVDAETC

SEQ ID NO: 924 - protein, 11 aa, Artificial Sequence
  Representative cyclic modulating agent based on cadherin-5 cell adhesion recognition sequence
CVFRVDAETGC

SEQ ID NO: 925 - protein, 5 aa, Artificial Sequence
  Representative cyclic modulating agent based on cadherin-5 cell adhesion recognition sequence
DDAEK

SEQ ID NO: 926 - protein, 6 aa, Artificial Sequence
  Representative cyclic modulating agent based on cadherin-5 cell adhesion recognition sequence
DVDAEK

SEQ ID NO: 927 - protein, 7 aa, Artificial Sequence
  Representative cyclic modulating agent based on cadherin-5 cell adhesion recognition sequence
DRVDAEK

SEQ ID NO: 928 - protein, 8 aa, Artificial Sequence
  Representative cyclic modulating agent based on cadherin-5 cell adhesion recognition sequence
DFRVDAEK

SEQ ID NO: 929 - protein, 9 aa, Artificial Sequence
  Representative cyclic modulating agent based on cadherin-5 cell adhesion recognition sequence
DVFRVDAEK

SEQ ID NO: 930 - protein, 5 aa, Artificial Sequence
  Representative cyclic modulating agent based on cadherin-5 cell adhesion recognition sequence
EDAEK

SEQ ID NO: 931 - protein, 6 aa, Artificial Sequence
  Representative cyclic modulating agent based on cadherin-5 cell adhesion recognition sequence
EVDAEK

SEQ ID NO: 932 - protein, 7 aa, Artificial Sequence
  Representative cyclic modulating agent based on cadherin-5 cell adhesion recognition sequence
ERVDAEK

SEQ ID NO: 933 - protein, 8 aa, Artificial Sequence
  Representative cyclic modulating agent based on cadherin-5 cell adhesion recognition sequence
EFRVDAEK

SEQ ID NO: 934 - protein, 9 aa, Artificial Sequence
  Representative cyclic modulating agent based on cadherin-5 cell adhesion recognition sequence
EVFRVDAEK

SEQ ID NO: 935 - protein, 5 aa, Artificial Sequence
  Representative cyclic modulating agent based on cadherin-5 cell adhesion recognition sequence
KDAED

SEQ ID NO: 936 - protein, 6 aa, Artificial Sequence
  Representative cyclic modulating agent based on cadherin-5 cell adhesion recognition sequence
KVDAED

SEQ ID NO: 937 - protein, 6 aa, Artificial Sequence
  Representative cyclic modulating agent based on cadherin-5 cell adhesion recognition sequence
KDAETD

SEQ ID NO: 938 - protein, 7 aa, Artificial Sequence
  Representative cyclic modulating agent based on cadherin-5 cell adhesion recognition sequence
KRVDAED

SEQ ID NO: 939 - protein, 7 aa, Artificial Sequence
  Representative cyclic modulating agent based on cadherin-5 cell adhesion recognition sequence
KVDAETD

SEQ ID NO: 940 - protein, 8 aa, Artificial Sequence
  Representative cyclic modulating agent based on cadherin-5 cell adhesion recognition sequence
KRVDAETD

SEQ ID NO: 941 - protein, 7 aa, Artificial Sequence
  Representative cyclic modulating agent based on cadherin-5 cell adhesion recognition sequence
KDAETGD

SEQ ID NO: 942 - protein, 8 aa, Artificial Sequence
  Representative cyclic modulating agent based on cadherin-5 cell adhesion recognition sequence
KVDAETGD

SEQ ID NO: 943 - protein, 9 aa, Artificial Sequence
  Representative cyclic modulating agent based on cadherin-5 cell adhesion recognition sequence
KRVDAETGD

SEQ ID NO: 944 - protein, 8 aa, Artificial Sequence
  Representative cyclic modulating agent based on cadherin-5 cell adhesion recognition sequence
KFRVDAED

SEQ ID NO: 945 - protein, 9 aa, Artificial Sequence
  Representative cyclic modulating agent based on cadherin-5 cell adhesion recognition sequence
KFRVDAETD

SEQ ID NO: 946 - protein, 10 aa, Artificial Sequence
  Representative cyclic modulating agent based on cadherin-5 cell adhesion recognition sequence
KFRVDAETGD

SEQ ID NO: 947 - protein, 9 aa, Artificial Sequence
  Representative cyclic modulating agent based on cadherin-5 cell adhesion recognition sequence
KVFRVDAED

SEQ ID NO: 948 - protein, 10 aa, Artificial Sequence
  Representative cyclic modulating agent based on cadherin-5 cell adhesion recognition sequence
KVFRVDAETD

SEQ ID NO: 949 - protein, 11 aa, Artificial Sequence
  Representative cyclic modulating agent based on cadherin-5 cell adhesion recognition sequence
KVFRVDAETGD

SEQ ID NO: 950 - protein, 5 aa, Artificial Sequence
  Representative cyclic modulating agent based on cadherin-5 cell adhesion recognition sequence
VDAEK

SEQ ID NO: 951 - protein, 5 aa, Artificial Sequence
  Representative cyclic modulating agent based on cadherin-5 cell adhesion recognition sequence
IDAES

SEQ ID NO: 952 - protein, 5 aa, Artificial Sequence
  Representative cyclic modulating agent based on cadherin-5 cell adhesion recognition sequence
VDAES

SEQ ID NO: 953 - protein, 5 aa, Artificial Sequence
  Representative cyclic modulating agent based on cadherin-5 cell adhesion recognition sequence
DAETG

SEQ ID NO: 954 - protein, 6 aa, Artificial Sequence
  Representative cyclic modulating agent based on cadherin-5 cell adhesion recognition sequence
VDAETG

SEQ ID NO: 955 - protein, 5 aa, Artificial Sequence
  Representative cyclic modulating agent based on cadherin-5 cell adhesion recognition sequence
KDAEE

SEQ ID NO: 956 - protein, 5 aa, Artificial Sequence
  Representative cyclic modulating agent based on cadherin-5 cell adhesion recognition sequence
KVDAE

SEQ ID NO: 957 - protein, 6 aa, Artificial Sequence
  Representative cyclic modulating agent based on cadherin-5 cell adhesion recognition sequence
KDAETE

SEQ ID NO: 958 - protein, 6 aa, Artificial Sequence
  Representative cyclic modulating agent based on cadherin-5 cell adhesion recognition sequence
KRVDAE

SEQ ID NO: 959 - protein, 7 aa, Artificial Sequence
  Representative cyclic modulating agent based on cadherin-5 cell adhesion recognition sequence
KVDAETE

SEQ ID NO: 960 - protein, 8 aa, Artificial Sequence
  Representative cyclic modulating agent based on cadherin-5 cell adhesion recognition sequence
KRVDAETE

SEQ ID NO: 961 - protein, 7 aa, Artificial Sequence
  Representative cyclic modulating agent based on cadherin-5 cell adhesion recognition sequence
KDAETGE

SEQ ID NO: 962 - protein, 8 aa, Artificial Sequence
  Representative cyclic modulating agent based on cadherin-5 cell adhesion recognition sequence
KVDAETGE

SEQ ID NO: 963 - protein, 9 aa, Artificial Sequence
  Representative cyclic modulating agent based on cadherin-5 cell adhesion recognition sequence
KRVDAETGE

SEQ ID NO: 964 - protein, 7 aa, Artificial Sequence
  Representative cyclic modulating agent based on cadherin-5 cell adhesion recognition sequence
KFRVDAE

SEQ ID NO: 965 - protein, 9 aa, Artificial Sequence
  Representative cyclic modulating agent based on cadherin-5 cell adhesion recognition sequence
KFRVDAETE

SEQ ID NO: 966 - protein, 10 aa, Artificial Sequence
  Representative cyclic modulating agent based on cadherin-5 cell adhesion recognition sequence
KFRVDAETGE

SEQ ID NO: 967 - protein, 8 aa, Artificial Sequence
  Representative cyclic modulating agent based on cadherin-5 cell adhesion recognition sequence
KVFRVDAE

SEQ ID NO: 968 - protein, 10 aa, Artificial Sequence
  Representative cyclic modulating agent based on cadherin-5 cell adhesion recognition sequence
KVFRVDAETE

SEQ ID NO: 969 - protein, 11 aa, Artificial Sequence
  Representative cyclic modulating agent based on cadherin-5 cell adhesion recognition sequence
KVFRVDAETGE

SEQ ID NO: 970 - protein, 5 aa, Artificial Sequence
  Representative cyclic modulating agent based on cadherin-5 cell adhesion recognition sequence
VDAET

SEQ ID NO: 971 - protein, 6 aa, Artificial Sequence
  Representative cyclic modulating agent based on cadherin-5 cell adhesion recognition sequence
VDAETG

SEQ ID NO: 972 - protein, 5 aa, Artificial Sequence
  Representative cyclic modulating agent based on cadherin-5 cell adhesion recognition sequence
DAETG

SEQ ID NO: 973 - protein, 5 aa, Artificial Sequence
  Representative cyclic modulating agent based on cadherin-5 cell adhesion recognition sequence
RVDAE

SEQ ID NO: 974 - protein, 6 aa, Artificial Sequence
  Representative cyclic modulating agent based on cadherin-5 cell adhesion recognition sequence
RVDAET

SEQ ID NO: 975 - protein, 7 aa, Artificial Sequence
  Representative cyclic modulating agent based on cadherin-5 cell adhesion recognition sequence
RVDAETG

SEQ ID NO: 976 - protein, 6 aa, Artificial Sequence
  Representative cyclic modulating agent based on cadherin-5 cell adhesion recognition sequence
FRVDAE

SEQ ID NO: 977 - protein, 7 aa, Artificial Sequence
  Representative cyclic modulating agent based on cadherin-5 cell adhesion recognition sequence
FRVDAET

SEQ ID NO: 978 - protein, 8 aa, Artificial Sequence
  Representative cyclic modulating agent based on cadherin-5 cell adhesion recognition sequence
FRVDAETG

SEQ ID NO: 979 - protein, 7 aa, Artificial Sequence
  Representative cyclic modulating agent based on cadherin-5 cell adhesion recognition sequence
VFRVDAE

SEQ ID NO: 980 - protein, 8 aa, Artificial Sequence
  Representative cyclic modulating agent based on cadherin-5 cell adhesion recognition sequence
VFRVDAET

SEQ ID NO: 981 - protein, 9 aa, Artificial Sequence
  Representative cyclic modulating agent based on cadherin-5 cell adhesion recognition sequence
VFRVDAETG

SEQ ID NO: 982 - protein, 6 aa, Artificial Sequence
  Representative cyclic modulating agent based on cadherin-6 cell adhesion recognition sequence
DNENTK

SEQ ID NO: 983 - protein, 5 aa, Artificial Sequence
  Representative cyclic modulating agent based on cadherin-6 cell adhesion recognition sequence
CNENC

SEQ ID NO: 984 - protein, 6 aa, Artificial Sequence
  Representative cyclic modulating agent based on cadherin-6 cell adhesion recognition sequence
CINENC

SEQ ID NO: 985 - protein, 6 aa, Artificial Sequence
  Representative cyclic modulating agent based on cadherin-6 cell adhesion recognition sequence
CNENTC

SEQ ID NO: 986 - protein, 7 aa, Artificial Sequence
  Representative cyclic modulating agent based on cadherin-6 cell adhesion recognition sequence
CIINENC

SEQ ID NO: 987 - protein, 7 aa, Artificial Sequence
  Representative cyclic modulating agent based on cadherin-6 cell adhesion recognition sequence
CINENTC

SEQ ID NO: 988 - protein, 8 aa, Artificial Sequence
  Representative cyclic modulating agent based on cadherin-6 cell adhesion recognition sequence
CIINENTC

SEQ ID NO: 989 - protein, 7 aa, Artificial Sequence
  Representative cyclic modulating agent based on cadherin-6 cell adhesion recognition sequence
CNENTGC

SEQ ID NO: 990 - protein, 8 aa, Artificial Sequence
  Representative cyclic modulating agent based on cadherin-6 cell adhesion recognition sequence
CINENTGC

SEQ ID NO: 991 - protein, 9 aa, Artificial Sequence
  Representative cyclic modulating agent based on cadherin-6 cell adhesion recognition sequence
CIINENTGC

SEQ ID NO: 992 - protein, 8 aa, Artificial Sequence
  Representative cyclic modulating agent based on cadherin-6 cell adhesion recognition sequence
CFIINENC

SEQ ID NO: 993 - protein, 9 aa, Artificial Sequence
  Representative cyclic modulating agent based on cadherin-6 cell adhesion recognition sequence
CFIINENTC

SEQ ID NO: 994 - protein, 10 aa, Artificial Sequence
  Representative cyclic modulating agent based on cadherin-6 cell adhesion recognition sequence
CFIINENTGC

SEQ ID NO: 995 - protein, 9 aa, Artificial Sequence
  Representative cyclic modulating agent based on cadherin-6 cell adhesion recognition sequence
CLFIINENC

SEQ ID NO: 996 - protein, 10 aa, Artificial Sequence
  Representative cyclic modulating agent based on cadherin-6 cell adhesion recognition sequence
CLFIINENTC

SEQ ID NO: 997 - protein, 11 aa, Artificial Sequence
  Representative cyclic modulating agent based on cadherin-6 cell adhesion recognition sequence
CLFIINENTGC

SEQ ID NO: 998 - protein, 5 aa, Artificial Sequence
  Representative cyclic modulating agent based on cadherin-6 cell adhesion recognition sequence
DNENK

SEQ ID NO: 999 - protein, 6 aa, Artificial Sequence
  Representative cyclic modulating agent based on cadherin-6 cell adhesion recognition sequence
DINENK

SEQ ID NO: 1000 - protein, 7 aa, Artificial Sequence
  Representative cyclic modulating agent based on cadherin-6 cell adhesion recognition sequence
DIINENK

SEQ ID NO: 1001 - protein, 8 aa, Artificial Sequence
  Representative cyclic modulating agent based on cadherin-6 cell adhesion recognition sequence
DFIINENK

SEQ ID NO: 1002 - protein, 9 aa, Artificial Sequence
  Representative cyclic modulating agent based on cadherin-6 cell adhesion recognition sequence
DLFIINENK

SEQ ID NO: 1003 - protein, 5 aa, Artificial Sequence
  Representative cyclic modulating agent based on cadherin-6 cell adhesion recognition sequence
ENENK

SEQ ID NO: 1004 - protein, 6 aa, Artificial Sequence
  Representative cyclic modulating agent based on cadherin-6 cell adhesion recognition sequence
EINENK

SEQ ID NO: 1005 - protein, 7 aa, Artificial Sequence
  Representative cyclic modulating agent based on cadherin-6 cell adhesion recognition sequence
EIINENK

SEQ ID NO: 1006 - protein, 8 aa, Artificial Sequence
  Representative cyclic modulating agent based on cadherin-6 cell adhesion recognition sequence
EFIINENK

SEQ ID NO: 1007 - protein, 9 aa, Artificial Sequence
  Representative cyclic modulating agent based on cadherin-6 cell adhesion recognition sequence
ELFIINENK

SEQ ID NO: 1008 - protein, 5 aa, Artificial Sequence
  Representative cyclic modulating agent based on cadherin-6 cell adhesion recognition sequence
KNEND

SEQ ID NO: 1009 - protein, 6 aa, Artificial Sequence
  Representative cyclic modulating agent based on cadherin-6 cell adhesion recognition sequence
KINEND

SEQ ID NO: 1010 - protein, 6 aa, Artificial Sequence
  Representative cyclic modulating agent based on cadherin-6 cell adhesion recognition sequence
KNENTD

SEQ ID NO: 1011 - protein, 7 aa, Artificial Sequence
  Representative cyclic modulating agent based on cadherin-6 cell adhesion recognition sequence
KIINEND

SEQ ID NO: 1012 - protein, 7 aa, Artificial Sequence
  Representative cyclic modulating agent based on cadherin-6 cell adhesion recognition sequence
KINENTD

SEQ ID NO: 1013 - protein, 8 aa, Artificial Sequence
  Representative cyclic modulating agent based on cadherin-6 cell adhesion recognition sequence
KIINENTD

SEQ ID NO: 1014 - protein, 7 aa, Artificial Sequence
  Representative cyclic modulating agent based on cadherin-6 cell adhesion recognition sequence
KNENTGD

SEQ ID NO: 1015 - protein, 8 aa, Artificial Sequence
  Representative cyclic modulating agent based on cadherin-6 cell adhesion recognition sequence
KINENTGD

SEQ ID NO: 1016 - protein, 9 aa, Artificial Sequence
  Representative cyclic modulating agent based on cadherin-6 cell adhesion recognition sequence
KIINENTGD

SEQ ID NO: 1017 - protein, 8 aa, Artificial Sequence
  Representative cyclic modulating agent based on cadherin-6 cell adhesion recognition sequence
KFIINEND

SEQ ID NO: 1018 - protein, 9 aa, Artificial Sequence
  Representative cyclic modulating agent based on cadherin-6 cell adhesion recognition sequence
KFIINENTD

SEQ ID NO: 1019 - protein, 10 aa, Artificial Sequence
  Representative cyclic modulating agent based on cadherin-6 cell adhesion recognition sequence
KFIINENTGD

SEQ ID NO: 1020 - protein, 9 aa, Artificial Sequence
  Representative cyclic modulating agent based on cadherin-6 cell adhesion recognition sequence
KLFIINEND

SEQ ID NO: 1021 - protein, 10 aa, Artificial Sequence
  Representative cyclic modulating agent based on cadherin-6 cell adhesion recognition sequence
KLFIINENTD

SEQ ID NO: 1022 - protein, 11 aa, Artificial Sequence
  Representative cyclic modulating agent based on cadherin-6 cell adhesion recognition sequence
KLFIINENTGD

SEQ ID NO: 1023 - protein, 5 aa, Artificial Sequence
  Representative cyclic modulating agent based on cadherin-6 cell adhesion recognition sequence
VNENT

SEQ ID NO: 1024 - protein, 5 aa, Artificial Sequence
  Representative cyclic modulating agent based on cadherin-6 cell adhesion recognition sequence
INENT

SEQ ID NO: 1025 - protein, 6 aa, Artificial Sequence
  Representative cyclic modulating agent based on cadherin-6 cell adhesion recognition sequence
IINENT

SEQ ID NO: 1026 - protein, 5 aa, Artificial Sequence
  Representative cyclic modulating agent based on cadherin-6 cell adhesion recognition sequence
NENTG

SEQ ID NO: 1027 - protein, 6 aa, Artificial Sequence
  Representative cyclic modulating agent based on cadherin-6 cell adhesion recognition sequence
INENTG

SEQ ID NO: 1028 - protein, 5 aa, Artificial Sequence
  Representative cyclic modulating agent based on cadherin-6 cell adhesion recognition sequence
KNENE

SEQ ID NO: 1029 - protein, 6 aa, Artificial Sequence
  Representative cyclic modulating agent based on cadherin-6 cell adhesion recognition sequence
KINENE

SEQ ID NO: 1030 - protein, 6 aa, Artificial Sequence
  Representative cyclic modulating agent based on cadherin-6 cell adhesion recognition sequence
KNENTE

SEQ ID NO: 1031 - protein, 7 aa, Artificial Sequence
  Representative cyclic modulating agent based on cadherin-6 cell adhesion recognition sequence
KIINENE

SEQ ID NO: 1032 - protein, 7 aa, Artificial Sequence
  Representative cyclic modulating agent based on cadherin-6 cell adhesion recognition sequence
KINENTE

SEQ ID NO: 1033 - protein, 8 aa, Artificial Sequence
  Representative cyclic modulating agent based on cadherin-6 cell adhesion recognition sequence
KIINENTE

SEQ ID NO: 1034 - protein, 7 aa, Artificial Sequence
  Representative cyclic modulating agent based on cadherin-6 cell adhesion recognition sequence
KNENTGE

SEQ ID NO: 1035 - protein, 8 aa, Artificial Sequence
  Representative cyclic modulating agent based on cadherin-6 cell adhesion recognition sequence
KINENTGE

SEQ ID NO: 1036 - protein, 9 aa, Artificial Sequence
  Representative cyclic modulating agent based on cadherin-6 cell adhesion recognition sequence
KIINENTGE

SEQ ID NO: 1037 - protein, 8 aa, Artificial Sequence
  Representative cyclic modulating agent based on cadherin-6 cell adhesion recognition sequence
KFIINENE

SEQ ID NO: 1038 - protein, 9 aa, Artificial Sequence
  Representative cyclic modulating agent based on cadherin-6 cell adhesion recognition sequence
KFIINENTE

SEQ ID NO: 1039 - protein, 10 aa, Artificial Sequence
  Representative cyclic modulating agent based on cadherin-6 cell adhesion recognition sequence
KFIINENTGE

SEQ ID NO: 1040 - protein, 9 aa, Artificial Sequence
  Representative cyclic modulating agent based on cadherin-6 cell adhesion recognition sequence
KLFIINENE

SEQ ID NO: 1041 - protein, 10 aa, Artificial Sequence
  Representative cyclic modulating agent based on cadherin-6 cell adhesion recognition sequence
KLFIINENTE

SEQ ID NO: 1042 - protein, 11 aa, Artificial Sequence
  Representative cyclic modulating agent based on cadherin-6 cell adhesion recognition sequence
KLFIINENTGE

SEQ ID NO: 1043 - protein, 5 aa, Artificial Sequence
  Representative cyclic modulating agent based on cadherin-6 cell adhesion recognition sequence
IINEN

SEQ ID NO: 1044 - protein, 6 aa, Artificial Sequence
  Representative cyclic modulating agent based on cadherin-6 cell adhesion recognition sequence
FIINEN

SEQ ID NO: 1045 - protein, 7 aa, Artificial Sequence
  Representative cyclic modulating agent based on cadherin-6 cell adhesion recognition sequence
FIINENT

SEQ ID NO: 1046 - protein, 8 aa, Artificial Sequence
  Representative cyclic modulating agent based on cadherin-6 cell adhesion recognition sequence
FIINENTG

SEQ ID NO: 1047 - protein, 7 aa, Artificial Sequence
  Representative cyclic modulating agent based on cadherin-6 cell adhesion recognition sequence
LFIINEN

SEQ ID NO: 1048 - protein, 8 aa, Artificial Sequence
  Representative cyclic modulating agent based on cadherin-6 cell adhesion recognition sequence
LFIINENT

SEQ ID NO: 1049 - protein, 9 aa, Artificial Sequence
  Representative cyclic modulating agent based on cadherin-6 cell adhesion recognition sequence
LFIINENTG

SEQ ID NO: 1050 - protein, 5 aa, Artificial Sequence
  Representative cyclic modulating agent based on cadherin-6 cell adhesion recognition sequence
CEEYC

SEQ ID NO: 1051 - protein, 6 aa, Artificial Sequence
  Representative cyclic modulating agent based on cadherin-6 cell adhesion recognition sequence
CEEYTC

SEQ ID NO: 1052 - protein, 7 aa, Artificial Sequence
  Representative cyclic modulating agent based on cadherin-6 cell adhesion recognition sequence
CEEYTGC

SEQ ID NO: 1053 - protein, 6 aa, Artificial Sequence
  Representative cyclic modulating agent based on cadherin-6 cell adhesion recognition sequence
CLEEYC

SEQ ID NO: 1054 - protein, 7 aa, Artificial Sequence
  Representative cyclic modulating agent based on cadherin-6 cell adhesion recognition sequence
CLEEYTC

SEQ ID NO: 1055 - protein, 8 aa, Artificial Sequence
  Representative cyclic modulating agent based on cadherin-6 cell adhesion recognition sequence
CLEEYTGC

SEQ ID NO: 1056 - protein, 7 aa, Artificial Sequence
  Representative cyclic modulating agent based on cadherin-6 cell adhesion recognition sequence
CLLEEYC

SEQ ID NO: 1057 - protein, 9 aa, Artificial Sequence
  Representative cyclic modulating agent based on cadherin-6 cell adhesion recognition sequence
CLLEEYTGC

SEQ ID NO: 1058 - protein, 8 aa, Artificial Sequence
  Representative cyclic modulating agent based on cadherin-6 cell adhesion recognition sequence
CFLLEEYC

SEQ ID NO: 1059 - protein, 8 aa, Artificial Sequence
  Representative cyclic modulating agent based on cadherin-6 cell adhesion recognition sequence
CLLEEYTC

SEQ ID NO: 1060 - protein, 10 aa, Artificial Sequence
  Representative cyclic modulating agent based on cadherin-6 cell adhesion recognition sequence
CFLLEEYTGC

SEQ ID NO: 1061 - protein, 9 aa, Artificial Sequence
  Representative cyclic modulating agent based on cadherin-6 cell adhesion recognition sequence
CFFLLEEYC

SEQ ID NO: 1062 - protein, 10 aa, Artificial Sequence
  Representative cyclic modulating agent based on cadherin-6 cell adhesion recognition sequence
CFFLLEEYTC

SEQ ID NO: 1063 - protein, 11 aa, Artificial Sequence
  Representative cyclic modulating agent based on cadherin-6 cell adhesion recognition sequence
CFFLLEEYTGC

SEQ ID NO: 1064 - protein, 5 aa, Artificial Sequence
  Representative cyclic modulating agent based on cadherin-6 cell adhesion recognition sequence
CESEC

SEQ ID NO: 1065 - protein, 6 aa, Artificial Sequence
  Representative cyclic modulating agent based on cadherin-6 cell adhesion recognition sequence
CESETC

SEQ ID NO: 1066 - protein, 7 aa, Artificial Sequence
  Representative cyclic modulating agent based on cadherin-6 cell adhesion recognition sequence
CESETGC

SEQ ID NO: 1067 - protein, 6 aa, Artificial Sequence
  Representative cyclic modulating agent based on cadherin-6 cell adhesion recognition sequence
CVESEC

SEQ ID NO: 1068 - protein, 7 aa, Artificial Sequence
  Representative cyclic modulating agent based on cadherin-6 cell adhesion recognition sequence
CVSESTC

SEQ ID NO: 1069 - protein, 8 aa, Artificial Sequence
  Representative cyclic modulating agent based on cadherin-6 cell adhesion recognition sequence
CVESETGC

SEQ ID NO: 1070 - protein, 7 aa, Artificial Sequence
  Representative cyclic modulating agent based on cadherin-6 cell adhesion recognition sequence
CSVESEC

SEQ ID NO: 1071 - protein, 8 aa, Artificial Sequence
  Representative cyclic modulating agent based on cadherin-6 cell adhesion recognition sequence
CSVESETC

SEQ ID NO: 1072 - protein, 9 aa, Artificial Sequence
  Representative cyclic modulating agent based on cadherin-6 cell adhesion recognition sequence
CSVESETGC

SEQ ID NO: 1073 - protein, 8 aa, Artificial Sequence
  Representative cyclic modulating agent based on cadherin-6 cell adhesion recognition sequence
CFSVESEC

SEQ ID NO: 1074 - protein, 9 aa, Artificial Sequence
  Representative cyclic modulating agent based on cadherin-6 cell adhesion recognition sequence
CFSVESETC

SEQ ID NO: 1075 - protein, 10 aa, Artificial Sequence
  Representative cyclic modulating agent based on cadherin-6 cell adhesion recognition sequence
CFSVESETGC

SEQ ID NO: 1076 - protein, 9 aa, Artificial Sequence
  Representative cyclic modulating agent based on cadherin-6 cell adhesion recognition sequence
CYFSVESEC

SEQ ID NO: 1077 - protein, 10 aa, Artificial Sequence
  Representative cyclic modulating agent based on cadherin-6 cell adhesion recognition sequence
CYFSVESETC

SEQ ID NO: 1078 - protein, 11 aa, Artificial Sequence
  Representative cyclic modulating agent based on cadherin-6 cell adhesion recognition sequence
CYFSVESETGC

SEQ ID NO: 1079 - protein, 5 aa, Artificial Sequence
  Representative cyclic modulating agent based on cadherin-6 cell adhesion recognition sequence
CDSGC

SEQ ID NO: 1080 - protein, 6 aa, Artificial Sequence
  Representative cyclic modulating agent based on cadherin-6 cell adhesion recognition sequence
CDSGNC

SEQ ID NO: 1081 - protein, 7 aa, Artificial Sequence
  Representative cyclic modulating agent based on cadherin-6 cell adhesion recognition sequence
CDSGNGC

SEQ ID NO: 1082 - protein, 6 aa, Artificial Sequence
  Representative cyclic modulating agent based on cadherin-6 cell adhesion recognition sequence
CIDSGC

SEQ ID NO: 1083 - protein, 7 aa, Artificial Sequence
  Representative cyclic modulating agent based on cadherin-6 cell adhesion recognition sequence
CIDSGNC

SEQ ID NO: 1084 - protein, 8 aa, Artificial Sequence
  Representative cyclic modulating agent based on cadherin-6 cell adhesion recognition sequence
CIDSGNGC

SEQ ID NO: 1085 - protein, 7 aa, Artificial Sequence
  Representative cyclic modulating agent based on cadherin-6 cell adhesion recognition sequence
CNIDSGC

SEQ ID NO: 1086 - protein, 8 aa, Artificial Sequence
  Representative cyclic modulating agent based on cadherin-6 cell adhesion recognition sequence
CNIDSGNC

SEQ ID NO: 1087 - protein, 9 aa, Artificial Sequence
  Representative cyclic modulating agent based on cadherin-6 cell adhesion recognition sequence
CNIDSGNGC

SEQ ID NO: 1088 - protein, 8 aa, Artificial Sequence
  Representative cyclic modulating agent based on cadherin-6 cell adhesion recognition sequence
CFNIDSGC

SEQ ID NO: 1089 - protein, 9 aa, Artificial Sequence
  Representative cyclic modulating agent based on cadherin-6 cell adhesion recognition sequence
CFNIDSGNC

SEQ ID NO: 1090 - protein, 10 aa, Artificial Sequence
  Representative cyclic modulating agent based on cadherin-6 cell adhesion recognition sequence
CFNIDSGNGC

SEQ ID NO: 1091 - protein, 9 aa, Artificial Sequence
  Representative cyclic modulating agent based on cadherin-6 cell adhesion recognition sequence
CIFNIDSGC

SEQ ID NO: 1092 - protein, 10 aa, Artificial Sequence
  Representative cyclic modulating agent based on cadherin-6 cell adhesion recognition sequence
CIFNIDSGNC

SEQ ID NO: 1093 - protein, 11 aa, Artificial Sequence
  Representative cyclic modulating agent based on cadherin-6 cell adhesion recognition sequence
CIFNIDSGNGC

SEQ ID NO: 1094 - protein, 5 aa, Artificial Sequence
  Representative cyclic modulating agent based on cadherin-6 cell adhesion recognition sequence
KEEYD

SEQ ID NO: 1095 - protein, 6 aa, Artificial Sequence
  Representative cyclic modulating agent based on cadherin-6 cell adhesion recognition sequence
KLEEYD

SEQ ID NO: 1096 - protein, 6 aa, Artificial Sequence
  Representative cyclic modulating agent based on cadherin-6 cell adhesion recognition sequence
KEEYTD

SEQ ID NO: 1097 - protein, 7 aa, Artificial Sequence
  Representative cyclic modulating agent based on cadherin-6 cell adhesion recognition sequence
KEEYTGD

SEQ ID NO: 1098 - protein, 7 aa, Artificial Sequence
  Representative cyclic modulating agent based on cadherin-6 cell adhesion recognition sequence
KLEEYTD

SEQ ID NO: 1099 - protein, 8 aa, Artificial Sequence
  Representative cyclic modulating agent based on cadherin-6 cell adhesion recognition sequence
KLEEYTGD

SEQ ID NO: 1100 - protein, 7 aa, Artificial Sequence
  Representative cyclic modulating agent based on cadherin-6 cell adhesion recognition sequence
KLLEEYD

SEQ ID NO: 1101 - protein, 9 aa, Artificial Sequence
  Representative cyclic modulating agent based on cadherin-6 cell adhesion recognition sequence
KLLEEYTGD

SEQ ID NO: 1102 - protein, 8 aa, Artificial Sequence
  Representative cyclic modulating agent based on cadherin-6 cell adhesion recognition sequence
KFLLEEYD

SEQ ID NO: 1103 - protein, 8 aa, Artificial Sequence
  Representative cyclic modulating agent based on cadherin-6 cell adhesion recognition sequence
KLLEEYTD

SEQ ID NO: 1104 - protein, 10 aa, Artificial Sequence
  Representative cyclic modulating agent based on cadherin-6 cell adhesion recognition sequence
KFLLEEYTGD

SEQ ID NO: 1105 - protein, 9 aa, Artificial Sequence
  Representative cyclic modulating agent based on cadherin-6 cell adhesion recognition sequence
KFFLLEEYD

SEQ ID NO: 1106 - protein, 10 aa, Artificial Sequence
  Representative cyclic modulating agent based on cadherin-6 cell adhesion recognition sequence
KFFLLEEYTD

SEQ ID NO: 1107 - protein, 11 aa, Artificial Sequence
  Representative cyclic modulating agent based on cadherin-6 cell adhesion recognition sequence
KFFLLEEYTGD

SEQ ID NO: 1108 - protein, 5 aa, Artificial Sequence
  Representative cyclic modulating agent based on cadherin-6 cell adhesion recognition sequence
KESED

SEQ ID NO: 1109 - protein, 6 aa, Artificial Sequence
  Representative cyclic modulating agent based on cadherin-6 cell adhesion recognition sequence
KESETD

SEQ ID NO: 1110 - protein, 7 aa, Artificial Sequence
  Representative cyclic modulating agent based on cadherin-6 cell adhesion recognition sequence
KESETGD

SEQ ID NO: 1111 - protein, 6 aa, Artificial Sequence
  Representative cyclic modulating agent based on cadherin-6 cell adhesion recognition sequence
KVESED

SEQ ID NO: 1112 - protein, 7 aa, Artificial Sequence
  Representative cyclic modulating agent based on cadherin-6 cell adhesion recognition sequence
KVSESTD

SEQ ID NO: 1113 - protein, 8 aa, Artificial Sequence
  Representative cyclic modulating agent based on cadherin-6 cell adhesion recognition sequence
KVESETGD

SEQ ID NO: 1114 - protein, 7 aa, Artificial Sequence
  Representative cyclic modulating agent based on cadherin-6 cell adhesion recognition sequence
KSVESED

SEQ ID NO: 1115 - protein, 8 aa, Artificial Sequence
  Representative cyclic modulating agent based on cadherin-6 cell adhesion recognition sequence
KSVESETD

SEQ ID NO: 1116 - protein, 9 aa, Artificial Sequence
  Representative cyclic modulating agent based on cadherin-6 cell adhesion recognition sequence
KSVESETGD

SEQ ID NO: 1117 - protein, 8 aa, Artificial Sequence
  Representative cyclic modulating agent based on cadherin-6 cell adhesion recognition sequence
KFSVESED

SEQ ID NO: 1118 - protein, 9 aa, Artificial Sequence
  Representative cyclic modulating agent based on cadherin-6 cell adhesion recognition sequence
KFSVESETD

SEQ ID NO: 1119 - protein, 10 aa, Artificial Sequence
  Representative cyclic modulating agent based on cadherin-6 cell adhesion recognition sequence
KFSVESETGD

SEQ ID NO: 1120 - protein, 9 aa, Artificial Sequence
  Representative cyclic modulating agent based on cadherin-6 cell adhesion recognition sequence
KYFSVESED

SEQ ID NO: 1121 - protein, 10 aa, Artificial Sequence
  Representative cyclic modulating agent based on cadherin-6 cell adhesion recognition sequence
KYFSVESETD

SEQ ID NO: 1122 - protein, 11 aa, Artificial Sequence
  Representative cyclic modulating agent based on cadherin-6 cell adhesion recognition sequence
KYFSVESETGD

SEQ ID NO: 1123 - protein, 5 aa, Artificial Sequence
  Representative cyclic modulating agent based on cadherin-6 cell adhesion recognition sequence
KDSGD

SEQ ID NO: 1124 - protein, 6 aa, Artificial Sequence
  Representative cyclic modulating agent based on cadherin-6 cell adhesion recognition sequence
KDSGND

SEQ ID NO: 1125 - protein, 7 aa, Artificial Sequence
  Representative cyclic modulating agent based on cadherin-6 cell adhesion recognition sequence
KDSGNGD

SEQ ID NO: 1126 - protein, 6 aa, Artificial Sequence
  Representative cyclic modulating agent based on cadherin-6 cell adhesion recognition sequence
KIDSGD

SEQ ID NO: 1127 - protein, 7 aa, Artificial Sequence
  Representative cyclic modulating agent based on cadherin-6 cell adhesion recognition sequence
KIDSGND

SEQ ID NO: 1128 - protein, 8 aa, Artificial Sequence
  Representative cyclic modulating agent based on cadherin-6 cell adhesion recognition sequence
KIDSGNGD

SEQ ID NO: 1129 - protein, 7 aa, Artificial Sequence
  Representative cyclic modulating agent based on cadherin-6 cell adhesion recognition sequence
KNIDSGD

SEQ ID NO: 1130 - protein, 8 aa, Artificial Sequence
  Representative cyclic modulating agent based on cadherin-6 cell adhesion recognition sequence
KNIDSGND

SEQ ID NO: 1131 - protein, 9 aa, Artificial Sequence
  Representative cyclic modulating agent based on cadherin-6 cell adhesion recognition sequence
KNIDSGNGD

SEQ ID NO: 1132 - protein, 8 aa, Artificial Sequence
  Representative cyclic modulating agent based on cadherin-6 cell adhesion recognition sequence
KFNIDSGD

SEQ ID NO: 1133 - protein, 9 aa, Artificial Sequence
  Representative cyclic modulating agent based on cadherin-6 cell adhesion recognition sequence
KFNIDSGND

SEQ ID NO: 1134 - protein, 10 aa, Artificial Sequence
  Representative cyclic modulating agent based on cadherin-6 cell adhesion recognition sequence
KFNIDSGNGD

SEQ ID NO: 1135 - protein, 9 aa, Artificial Sequence
  Representative cyclic modulating agent based on cadherin-6 cell adhesion recognition sequence
KIFNIDSGD

SEQ ID NO: 1136 - protein, 10 aa, Artificial Sequence
  Representative cyclic modulating agent based on cadherin-6 cell adhesion recognition sequence
KIFNIDSGND

SEQ ID NO: 1137 - protein, 11 aa, Artificial Sequence
  Representative cyclic modulating agent based on cadherin-6 cell adhesion recognition sequence
KIFNIDSGNGD

SEQ ID NO: 1138 - protein, 5 aa, Artificial Sequence
  Representative cyclic modulating agent based on cadherin-6 cell adhesion recognition sequence
EEEYK

SEQ ID NO: 1139 - protein, 6 aa, Artificial Sequence
  Representative cyclic modulating agent based on cadherin-6 cell adhesion recognition sequence
EEEYTK

SEQ ID NO: 1140 - protein, 7 aa, Artificial Sequence
  Representative cyclic modulating agent based on cadherin-6 cell adhesion recognition sequence
EEEYTGK

SEQ ID NO: 1141 - protein, 6 aa, Artificial Sequence
  Representative cyclic modulating agent based on cadherin-6 cell adhesion recognition sequence
ELEEYK

SEQ ID NO: 1142 - protein, 6 aa, Artificial Sequence
  Representative cyclic modulating agent based on cadherin-6 cell adhesion recognition sequence
EEEYTK

SEQ ID NO: 1143 - protein, 8 aa, Artificial Sequence
  Representative cyclic modulating agent based on cadherin-6 cell adhesion recognition sequence
ELEEYTGK

SEQ ID NO: 1144 - protein, 7 aa, Artificial Sequence
  Representative cyclic modulating agent based on cadherin-6 cell adhesion recognition sequence
ELLEEYK

SEQ ID NO: 1145 - protein, 9 aa, Artificial Sequence
  Representative cyclic modulating agent based on cadherin-6 cell adhesion recognition sequence
ELLEEYTGK

SEQ ID NO: 1146 - protein, 8 aa, Artificial Sequence
  Representative cyclic modulating agent based on cadherin-6 cell adhesion recognition sequence
EFLLEEYK

SEQ ID NO: 1147 - protein, 8 aa, Artificial Sequence
  Representative cyclic modulating agent based on cadherin-6 cell adhesion recognition sequence
ELLEEYTK

SEQ ID NO: 1148 - protein, 10 aa, Artificial Sequence
  Representative cyclic modulating agent based on cadherin-6 cell adhesion recognition sequence
EFLLEEYTGK

SEQ ID NO: 1149 - protein, 9 aa, Artificial Sequence
  Representative cyclic modulating agent based on cadherin-6 cell adhesion recognition sequence
EFFLLEEYK

SEQ ID NO: 1150 - protein, 10 aa, Artificial Sequence
  Representative cyclic modulating agent based on cadherin-6 cell adhesion recognition sequence
EFFLLEEYTK

SEQ ID NO: 1151 - protein, 11 aa, Artificial Sequence
  Representative cyclic modulating agent based on cadherin-6 cell adhesion recognition sequence
EFFLLEEYTGK

SEQ ID NO: 1152 - protein, 5 aa, Artificial Sequence
  Representative cyclic modulating agent based on cadherin-6 cell adhesion recognition sequence
EESEK

SEQ ID NO: 1153 - protein, 6 aa, Artificial Sequence
  Representative cyclic modulating agent based on cadherin-6 cell adhesion recognition sequence
EESETK

SEQ ID NO: 1154 - protein, 7 aa, Artificial Sequence
  Representative cyclic modulating agent based on cadherin-6 cell adhesion recognition sequence
EESETGK

SEQ ID NO: 1155 - protein, 6 aa, Artificial Sequence
  Representative cyclic modulating agent based on cadherin-6 cell adhesion recognition sequence
EVESEK

SEQ ID NO: 1156 - protein, 7 aa, Artificial Sequence
  Representative cyclic modulating agent based on cadherin-6 cell adhesion recognition sequence
EVSESTK

SEQ ID NO: 1157 - protein, 8 aa, Artificial Sequence
  Representative cyclic modulating agent based on cadherin-6 cell adhesion recognition sequence
EVESETGK

SEQ ID NO: 1158 - protein, 7 aa, Artificial Sequence
  Representative cyclic modulating agent based on cadherin-6 cell adhesion recognition sequence
ESVESEK

SEQ ID NO: 1159 - protein, 8 aa, Artificial Sequence
  Representative cyclic modulating agent based on cadherin-6 cell adhesion recognition sequence
ESVESETK

SEQ ID NO: 1160 - protein, 9 aa, Artificial Sequence
  Representative cyclic modulating agent based on cadherin-6 cell adhesion recognition sequence
ESVESETGK

SEQ ID NO: 1161 - protein, 8 aa, Artificial Sequence
  Representative cyclic modulating agent based on cadherin-6 cell adhesion recognition sequence
EFSVESEK

SEQ ID NO: 1162 - protein, 9 aa, Artificial Sequence
  Representative cyclic modulating agent based on cadherin-6 cell adhesion recognition sequence
EFSVESETK

SEQ ID NO: 1163 - protein, 10 aa, Artificial Sequence
  Representative cyclic modulating agent based on cadherin-6 cell adhesion recognition sequence
EFSVESETGK

SEQ ID NO: 1164 - protein, 9 aa, Artificial Sequence
  Representative cyclic modulating agent based on cadherin-6 cell adhesion recognition sequence
EYFSVESEK

SEQ ID NO: 1165 - protein, 10 aa, Artificial Sequence
  Representative cyclic modulating agent based on cadherin-6 cell adhesion recognition sequence
EYFSVESETK

SEQ ID NO: 1166 - protein, 11 aa, Artificial Sequence
  Representative cyclic modulating agent based on cadherin-6 cell adhesion recognition sequence
EYFSVESETGK

SEQ ID NO: 1167 - protein, 5 aa, Artificial Sequence
  Representative cyclic modulating agent based on cadherin-6 cell adhesion recognition sequence
EDSGK

SEQ ID NO: 1168 - protein, 6 aa, Artificial Sequence
  Representative cyclic modulating agent based on cadherin-6 cell adhesion recognition sequence
EDSGNK

SEQ ID NO: 1169 - protein, 7 aa, Artificial Sequence
  Representative cyclic modulating agent based on cadherin-6 cell adhesion recognition sequence
EDSGNGK

SEQ ID NO: 1170 - protein, 6 aa, Artificial Sequence
  Representative cyclic modulating agent based on cadherin-6 cell adhesion recognition sequence
EIDSGK

SEQ ID NO: 1171 - protein, 7 aa, Artificial Sequence
  Representative cyclic modulating agent based on cadherin-6 cell adhesion recognition sequence
EIDSGNK

SEQ ID NO: 1172 - protein, 8 aa, Artificial Sequence
  Representative cyclic modulating agent based on cadherin-6 cell adhesion recognition sequence
EIDSGNGK

SEQ ID NO: 1173 - protein, 7 aa, Artificial Sequence
  Representative cyclic modulating agent based on cadherin-6 cell adhesion recognition sequence
ENIDSGK

SEQ ID NO: 1174 - protein, 8 aa, Artificial Sequence
  Representative cyclic modulating agent based on cadherin-6 cell adhesion recognition sequence
ENIDSGNK

SEQ ID NO: 1175 - protein, 9 aa, Artificial Sequence
  Representative cyclic modulating agent based on cadherin-6 cell adhesion recognition sequence
ENIDSGNGK

SEQ ID NO: 1176 - protein, 8 aa, Artificial Sequence
  Representative cyclic modulating agent based on cadherin-6 cell adhesion recognition sequence
EFNIDSGK

SEQ ID NO: 1177 - protein, 9 aa, Artificial Sequence
  Representative cyclic modulating agent based on cadherin-6 cell adhesion recognition sequence
EFNIDSGNK

SEQ ID NO: 1178 - protein, 10 aa, Artificial Sequence
  Representative cyclic modulating agent based on cadherin-6 cell adhesion recognition sequence
EFNIDSGNGK

SEQ ID NO: 1179 - protein, 9 aa, Artificial Sequence
  Representative cyclic modulating agent based on cadherin-6 cell adhesion recognition sequence
EIFNIDSGK

SEQ ID NO: 1180 - protein, 10 aa, Artificial Sequence
  Representative cyclic modulating agent based on cadherin-6 cell adhesion recognition sequence
EIFNIDSGNK

SEQ ID NO: 1181 - protein, 11 aa, Artificial Sequence
  Representative cyclic modulating agent based on cadherin-6 cell adhesion recognition sequence
EIFNIDSGNGK

SEQ ID NO: 1182 - protein, 5 aa, Artificial Sequence
  Representative cyclic modulating agent based on cadherin-6 cell adhesion recognition sequence
DEEYK

SEQ ID NO: 1183 - protein, 6 aa, Artificial Sequence
  Representative cyclic modulating agent based on cadherin-6 cell adhesion recognition sequence
DLEEYK

SEQ ID NO: 1184 - protein, 7 aa, Artificial Sequence
  Representative cyclic modulating agent based on cadherin-6 cell adhesion recognition sequence
DLEEYTK

SEQ ID NO: 1185 - protein, 8 aa, Artificial Sequence
  Representative cyclic modulating agent based on cadherin-6 cell adhesion recognition sequence
DLEEYTGK

SEQ ID NO: 1186 - protein, 7 aa, Artificial Sequence
  Representative cyclic modulating agent based on cadherin-6 cell adhesion recognition sequence
DLLEEYK

SEQ ID NO: 1187 - protein, 9 aa, Artificial Sequence
  Representative cyclic modulating agent based on cadherin-6 cell adhesion recognition sequence
DLLEEYTGK

SEQ ID NO: 1188 - protein, 8 aa, Artificial Sequence
  Representative cyclic modulating agent based on cadherin-6 cell adhesion recognition sequence
DFLLEEYK

SEQ ID NO: 1189 - protein, 8 aa, Artificial Sequence
  Representative cyclic modulating agent based on cadherin-6 cell adhesion recognition sequence
DLLEEYTK

SEQ ID NO: 1190 - protein, 10 aa, Artificial Sequence
  Representative cyclic modulating agent based on cadherin-6 cell adhesion recognition sequence
DFLLEEYTGK

SEQ ID NO: 1191 - protein, 9 aa, Artificial Sequence
  Representative cyclic modulating agent based on cadherin-6 cell adhesion recognition sequence
DFFLLEEYK

SEQ ID NO: 1192 - protein, 10 aa, Artificial Sequence
  Representative cyclic modulating agent based on cadherin-6 cell adhesion recognition sequence
DFFLLEEYTK

SEQ ID NO: 1193 - protein, 11 aa, Artificial Sequence
  Representative cyclic modulating agent based on cadherin-6 cell adhesion recognition sequence
DFFLLEEYTGK

SEQ ID NO: 1194 - protein, 5 aa, Artificial Sequence
  Representative cyclic modulating agent based on cadherin-6 cell adhesion recognition sequence
DESEK

SEQ ID NO: 1195 - protein, 6 aa, Artificial Sequence
  Representative cyclic modulating agent based on cadherin-6 cell adhesion recognition sequence
DESETK

SEQ ID NO: 1196 - protein, 7 aa, Artificial Sequence
  Representative cyclic modulating agent based on cadherin-6 cell adhesion recognition sequence
DESETGK

SEQ ID NO: 1197 - protein, 6 aa, Artificial Sequence
  Representative cyclic modulating agent based on cadherin-6 cell adhesion recognition sequence
DVESEK

SEQ ID NO: 1198 - protein, 7 aa, Artificial Sequence
  Representative cyclic modulating agent based on cadherin-6 cell adhesion recognition sequence
DVSESTK

SEQ ID NO: 1199 - protein, 8 aa, Artificial Sequence
  Representative cyclic modulating agent based on cadherin-6 cell adhesion recognition sequence
DVESETGK

SEQ ID NO: 1200 - protein, 7 aa, Artificial Sequence
  Representative cyclic modulating agent based on cadherin-6 cell adhesion recognition sequence
DSVESEK

SEQ ID NO: 1201 - protein, 8 aa, Artificial Sequence
  Representative cyclic modulating agent based on cadherin-6 cell adhesion recognition sequence
DSVESETK

SEQ ID NO: 1202 - protein, 9 aa, Artificial Sequence
  Representative cyclic modulating agent based on cadherin-6 cell adhesion recognition sequence
DSVESETGK

SEQ ID NO: 1203 - protein, 8 aa, Artificial Sequence
  Representative cyclic modulating agent based on cadherin-6 cell adhesion recognition sequence
DFSVESEK

SEQ ID NO: 1204 - protein, 9 aa, Artificial Sequence
  Representative cyclic modulating agent based on cadherin-6 cell adhesion recognition sequence
DFSVESETK

SEQ ID NO: 1205 - protein, 10 aa, Artificial Sequence
  Representative cyclic modulating agent based on cadherin-6 cell adhesion recognition sequence
DFSVESETGK

SEQ ID NO: 1206 - protein, 9 aa, Artificial Sequence
  Representative cyclic modulating agent based on cadherin-6 cell adhesion recognition sequence
DYFSVESEK

SEQ ID NO: 1207 - protein, 10 aa, Artificial Sequence
  Representative cyclic modulating agent based on cadherin-6 cell adhesion recognition sequence
DYFSVESETK

SEQ ID NO: 1208 - protein, 11 aa, Artificial Sequence
  Representative cyclic modulating agent based on cadherin-6 cell adhesion recognition sequence
DYFSVESETGK

SEQ ID NO: 1209 - protein, 5 aa, Artificial Sequence
  Representative cyclic modulating agent based on cadherin-6 cell adhesion recognition sequence
DDSGK

SEQ ID NO: 1210 - protein, 6 aa, Artificial Sequence
  Representative cyclic modulating agent based on cadherin-6 cell adhesion recognition sequence
DDSGNK

SEQ ID NO: 1211 - protein, 7 aa, Artificial Sequence
  Representative cyclic modulating agent based on cadherin-6 cell adhesion recognition sequence
DDSGNGK

SEQ ID NO: 1212 - protein, 6 aa, Artificial Sequence
  Representative cyclic modulating agent based on cadherin-6 cell adhesion recognition sequence
DIDSGK

SEQ ID NO: 1213 - protein, 7 aa, Artificial Sequence
  Representative cyclic modulating agent based on cadherin-6 cell adhesion recognition sequence
DIDSGNK

SEQ ID NO: 1214 - protein, 8 aa, Artificial Sequence
  Representative cyclic modulating agent based on cadherin-6 cell adhesion recognition sequence
DIDSGNGK

SEQ ID NO: 1215 - protein, 7 aa, Artificial Sequence
  Representative cyclic modulating agent based on cadherin-6 cell adhesion recognition sequence
DNIDSGK

SEQ ID NO: 1216 - protein, 8 aa, Artificial Sequence
  Representative cyclic modulating agent based on cadherin-6 cell adhesion recognition sequence
DNIDSGNK

SEQ ID NO: 1217 - protein, 9 aa, Artificial Sequence
  Representative cyclic modulating agent based on cadherin-6 cell adhesion recognition sequence
DNIDSGNGK

SEQ ID NO: 1218 - protein, 8 aa, Artificial Sequence
  Representative cyclic modulating agent based on cadherin-6 cell adhesion recognition sequence
DFNIDSGK

SEQ ID NO: 1219 - protein, 9 aa, Artificial Sequence
  Representative cyclic modulating agent based on cadherin-6 cell adhesion recognition sequence
DFNIDSGNK

SEQ ID NO: 1220 - protein, 10 aa, Artificial Sequence
  Representative cyclic modulating agent based on cadherin-6 cell adhesion recognition sequence
DFNIDSGNGK

SEQ ID NO: 1221 - protein, 9 aa, Artificial Sequence
  Representative cyclic modulating agent based on cadherin-6 cell adhesion recognition sequence
DIFNIDSGK

SEQ ID NO: 1222 - protein, 10 aa, Artificial Sequence
  Representative cyclic modulating agent based on cadherin-6 cell adhesion recognition sequence
DIFNIDSGNK

SEQ ID NO: 1223 - protein, 11 aa, Artificial Sequence
  Representative cyclic modulating agent based on cadherin-6 cell adhesion recognition sequence
DIFNIDSGNGK

SEQ ID NO: 1224 - protein, 5 aa, Artificial Sequence
  Representative cyclic modulating agent based on cadherin-6 cell adhesion recognition sequence
KEEYE

SEQ ID NO: 1225 - protein, 6 aa, Artificial Sequence
  Representative cyclic modulating agent based on cadherin-6 cell adhesion recognition sequence
KLEEYE

SEQ ID NO: 1226 - protein, 7 aa, Artificial Sequence
  Representative cyclic modulating agent based on cadherin-6 cell adhesion recognition sequence
KLEEYTE

SEQ ID NO: 1227 - protein, 8 aa, Artificial Sequence
  Representative cyclic modulating agent based on cadherin-6 cell adhesion recognition sequence
KLEEYTGE

SEQ ID NO: 1228 - protein, 7 aa, Artificial Sequence
  Representative cyclic modulating agent based on cadherin-6 cell adhesion recognition sequence
KLLEEYE

SEQ ID NO: 1229 - protein, 9 aa, Artificial Sequence
  Representative cyclic modulating agent based on cadherin-6 cell adhesion recognition sequence
KLLEEYTGE

SEQ ID NO: 1230 - protein, 8 aa, Artificial Sequence
  Representative cyclic modulating agent based on cadherin-6 cell adhesion recognition sequence
KFLLEEYE

SEQ ID NO: 1231 - protein, 8 aa, Artificial Sequence
  Representative cyclic modulating agent based on cadherin-6 cell adhesion recognition sequence
KLLEEYTE

SEQ ID NO: 1232 - protein, 10 aa, Artificial Sequence
  Representative cyclic modulating agent based on cadherin-6 cell adhesion recognition sequence
KFLLEEYTGE

SEQ ID NO: 1233 - protein, 9 aa, Artificial Sequence
  Representative cyclic modulating agent based on cadherin-6 cell adhesion recognition sequence
KFFLLEEYE

SEQ ID NO: 1234 - protein, 10 aa, Artificial Sequence
  Representative cyclic modulating agent based on cadherin-6 cell adhesion recognition sequence
KFFLLEEYTE

SEQ ID NO: 1235 - protein, 11 aa, Artificial Sequence
  Representative cyclic modulating agent based on cadherin-6 cell adhesion recognition sequence
KFFLLEEYTGE

SEQ ID NO: 1236 - protein, 5 aa, Artificial Sequence
  Representative cyclic modulating agent based on cadherin-6 cell adhesion recognition sequence
KNENE

SEQ ID NO: 1237 - protein, 6 aa, Artificial Sequence
  Representative cyclic modulating agent based on cadherin-6 cell adhesion recognition sequence
KNENTE

SEQ ID NO: 1238 - protein, 8 aa, Artificial Sequence
  Representative cyclic modulating agent based on cadherin-6 cell adhesion recognition sequence
KINENTGE

SEQ ID NO: 1239 - protein, 5 aa, Artificial Sequence
  Representative cyclic modulating agent based on cadherin-6 cell adhesion recognition sequence
KESEE

SEQ ID NO: 1240 - protein, 6 aa, Artificial Sequence
  Representative cyclic modulating agent based on cadherin-6 cell adhesion recognition sequence
KESETE

SEQ ID NO: 1241 - protein, 7 aa, Artificial Sequence
  Representative cyclic modulating agent based on cadherin-6 cell adhesion recognition sequence
KESETGE

SEQ ID NO: 1242 - protein, 6 aa, Artificial Sequence
  Representative cyclic modulating agent based on cadherin-6 cell adhesion recognition sequence
KVESEE

SEQ ID NO: 1243 - protein, 7 aa, Artificial Sequence
  Representative cyclic modulating agent based on cadherin-6 cell adhesion recognition sequence
KVSESTE

SEQ ID NO: 1244 - protein, 8 aa, Artificial Sequence
  Representative cyclic modulating agent based on cadherin-6 cell adhesion recognition sequence
KVESETGE

SEQ ID NO: 1245 - protein, 7 aa, Artificial Sequence
  Representative cyclic modulating agent based on cadherin-6 cell adhesion recognition sequence
KSVESEE

SEQ ID NO: 1246 - protein, 8 aa, Artificial Sequence
  Representative cyclic modulating agent based on cadherin-6 cell adhesion recognition sequence
KSVESETE

SEQ ID NO: 1247 - protein, 9 aa, Artificial Sequence
  Representative cyclic modulating agent based on cadherin-6 cell adhesion recognition sequence
KSVESETGE

SEQ ID NO: 1248 - protein, 8 aa, Artificial Sequence
  Representative cyclic modulating agent based on cadherin-6 cell adhesion recognition sequence
KFSVESEE

SEQ ID NO: 1249 - protein, 9 aa, Artificial Sequence
  Representative cyclic modulating agent based on cadherin-6 cell adhesion recognition sequence
KFSVESETE

SEQ ID NO: 1250 - protein, 10 aa, Artificial Sequence
  Representative cyclic modulating agent based on cadherin-6 cell adhesion recognition sequence
KFSVESETGE

SEQ ID NO: 1251 - protein, 9 aa, Artificial Sequence
  Representative cyclic modulating agent based on cadherin-6 cell adhesion recognition sequence
KYFSVESEE

SEQ ID NO: 1252 - protein, 10 aa, Artificial Sequence
  Representative cyclic modulating agent based on cadherin-6 cell adhesion recognition sequence
KYFSVESETE

SEQ ID NO: 1253 - protein, 11 aa, Artificial Sequence
  Representative cyclic modulating agent based on cadherin-6 cell adhesion recognition sequence
KYFSVESETGE

SEQ ID NO: 1254 - protein, 5 aa, Artificial Sequence
  Representative cyclic modulating agent based on cadherin-6 cell adhesion recognition sequence
KDSGE

SEQ ID NO: 1255 - protein, 6 aa, Artificial Sequence
  Representative cyclic modulating agent based on cadherin-6 cell adhesion recognition sequence
KDSGNE

SEQ ID NO: 1256 - protein, 7 aa, Artificial Sequence
  Representative cyclic modulating agent based on cadherin-6 cell adhesion recognition sequence
KDSGNGE

SEQ ID NO: 1257 - protein, 6 aa, Artificial Sequence
  Representative cyclic modulating agent based on cadherin-6 cell adhesion recognition sequence
KIDSGE

SEQ ID NO: 1258 - protein, 7 aa, Artificial Sequence
  Representative cyclic modulating agent based on cadherin-6 cell adhesion recognition sequence
KIDSGNE

SEQ ID NO: 1259 - protein, 8 aa, Artificial Sequence
  Representative cyclic modulating agent based on cadherin-6 cell adhesion recognition sequence
KIDSGNGE

SEQ ID NO: 1260 - protein, 7 aa, Artificial Sequence
  Representative cyclic modulating agent based on cadherin-6 cell adhesion recognition sequence
KNIDSGE

SEQ ID NO: 1261 - protein, 8 aa, Artificial Sequence
  Representative cyclic modulating agent based on cadherin-6 cell adhesion recognition sequence
KNIDSGNE

SEQ ID NO: 1262 - protein, 9 aa, Artificial Sequence
  Representative cyclic modulating agent based on cadherin-6 cell adhesion recognition sequence
KNIDSGNGE

SEQ ID NO: 1263 - protein, 8 aa, Artificial Sequence
  Representative cyclic modulating agent based on cadherin-6 cell adhesion recognition sequence
KFNIDSGE

SEQ ID NO: 1264 - protein, 9 aa, Artificial Sequence
  Representative cyclic modulating agent based on cadherin-6 cell adhesion recognition sequence
KFNIDSGNE

SEQ ID NO: 1265 - protein, 10 aa, Artificial Sequence
  Representative cyclic modulating agent based on cadherin-6 cell adhesion recognition sequence
KFNIDSGNGE

SEQ ID NO: 1266 - protein, 9 aa, Artificial Sequence
  Representative cyclic modulating agent based on cadherin-6 cell adhesion recognition sequence
KIFNIDSGE

SEQ ID NO: 1267 - protein, 10 aa, Artificial Sequence
  Representative cyclic modulating agent based on cadherin-6 cell adhesion recognition sequence
KIFNIDSGNE

SEQ ID NO: 1268 - protein, 11 aa, Artificial Sequence
  Representative cyclic modulating agent based on cadherin-6 cell adhesion recognition sequence
KIFNIDSGNGE

SEQ ID NO: 1269 - protein, 5 aa, Artificial Sequence
  Representative cyclic modulating agent based on cadherin-6 cell adhesion recognition sequence
LEEYT

SEQ ID NO: 1270 - protein, 6 aa, Artificial Sequence
  Representative cyclic modulating agent based on cadherin-6 cell adhesion recognition sequence
LEEYTG

SEQ ID NO: 1271 - protein, 5 aa, Artificial Sequence
  Representative cyclic modulating agent based on cadherin-6 cell adhesion recognition sequence
LLEEY

SEQ ID NO: 1272 - protein, 7 aa, Artificial Sequence
  Representative cyclic modulating agent based on cadherin-6 cell adhesion recognition sequence
LLEEYTG

SEQ ID NO: 1273 - protein, 6 aa, Artificial Sequence
  Representative cyclic modulating agent based on cadherin-6 cell adhesion recognition sequence
FLLEEY

SEQ ID NO: 1274 - protein, 6 aa, Artificial Sequence
  Representative cyclic modulating agent based on cadherin-6 cell adhesion recognition sequence
LLEEYT

SEQ ID NO: 1275 - protein, 8 aa, Artificial Sequence
  Representative cyclic modulating agent based on cadherin-6 cell adhesion recognition sequence
FLLEEYTG

SEQ ID NO: 1276 - protein, 7 aa, Artificial Sequence
  Representative cyclic modulating agent based on cadherin-6 cell adhesion recognition sequence
FFLLEEY

SEQ ID NO: 1277 - protein, 8 aa, Artificial Sequence
  Representative cyclic modulating agent based on cadherin-6 cell adhesion recognition sequence
FFLLEEYT

SEQ ID NO: 1278 - protein, 9 aa, Artificial Sequence
  Representative cyclic modulating agent based on cadherin-6 cell adhesion recognition sequence
FFLLEEYTG

SEQ ID NO: 1279 - protein, 5 aa, Artificial Sequence
  Representative cyclic modulating agent based on cadherin-6 cell adhesion recognition sequence
ESETG

SEQ ID NO: 1280 - protein, 5 aa, Artificial Sequence
  Representative cyclic modulating agent based on cadherin-6 cell adhesion recognition sequence
VSEST

SEQ ID NO: 1281 - protein, 6 aa, Artificial Sequence
  Representative cyclic modulating agent based on cadherin-6 cell adhesion recognition sequence
VESETG

SEQ ID NO: 1282 - protein, 5 aa, Artificial Sequence
  Representative cyclic modulating agent based on cadherin-6 cell adhesion recognition sequence
SVESE

SEQ ID NO: 1283 - protein, 6 aa, Artificial Sequence
  Representative cyclic modulating agent based on cadherin-6 cell adhesion recognition sequence
SVESET

SEQ ID NO: 1284 - protein, 7 aa, Artificial Sequence
  Representative cyclic modulating agent based on cadherin-6 cell adhesion recognition sequence
SVESETG

SEQ ID NO: 1285 - protein, 6 aa, Artificial Sequence
  Representative cyclic modulating agent based on cadherin-6 cell adhesion recognition sequence
FSVESE

SEQ ID NO: 1286 - protein, 7 aa, Artificial Sequence
  Representative cyclic modulating agent based on cadherin-6 cell adhesion recognition sequence
FSVESET

SEQ ID NO: 1287 - protein, 8 aa, Artificial Sequence
  Representative cyclic modulating agent based on cadherin-6 cell adhesion recognition sequence
FSVESETG

SEQ ID NO: 1288 - protein, 7 aa, Artificial Sequence
  Representative cyclic modulating agent based on cadherin-6 cell adhesion recognition sequence
YFSVESE

SEQ ID NO: 1289 - protein, 8 aa, Artificial Sequence
  Representative cyclic modulating agent based on cadherin-6 cell adhesion recognition sequence
YFSVESET

SEQ ID NO: 1290 - protein, 9 aa, Artificial Sequence
  Representative cyclic modulating agent based on cadherin-6 cell adhesion recognition sequence
YFSVESETG

SEQ ID NO: 1291 - protein, 5 aa, Artificial Sequence
  Representative cyclic modulating agent based on cadherin-6 cell adhesion recognition sequence
DSGNG

SEQ ID NO: 1292 - protein, 5 aa, Artificial Sequence
  Representative cyclic modulating agent based on cadherin-6 cell adhesion recognition sequence
IDSGN

SEQ ID NO: 1293 - protein, 6 aa, Artificial Sequence
  Representative cyclic modulating agent based on cadherin-6 cell adhesion recognition sequence
IDSGNG

SEQ ID NO: 1294 - protein, 5 aa, Artificial Sequence
  Representative cyclic modulating agent based on cadherin-6 cell adhesion recognition sequence
NIDSG

SEQ ID NO: 1295 - protein, 6 aa, Artificial Sequence
  Representative cyclic modulating agent based on cadherin-6 cell adhesion recognition sequence
NIDSGN

SEQ ID NO: 1296 - protein, 7 aa, Artificial Sequence
  Representative cyclic modulating agent based on cadherin-6 cell adhesion recognition sequence
NIDSGNG

SEQ ID NO: 1297 - protein, 6 aa, Artificial Sequence
  Representative cyclic modulating agent based on cadherin-6 cell adhesion recognition sequence
FNIDSG

SEQ ID NO: 1298 - protein, 7 aa, Artificial Sequence
  Representative cyclic modulating agent based on cadherin-6 cell adhesion recognition sequence
FNIDSGN

SEQ ID NO: 1299 - protein, 8 aa, Artificial Sequence
  Representative cyclic modulating agent based on cadherin-6 cell adhesion recognition sequence
FNIDSGNG

SEQ ID NO: 1300 - protein, 7 aa, Artificial Sequence
  Representative cyclic modulating agent based on cadherin-6 cell adhesion recognition sequence
IFNIDSG

SEQ ID NO: 1301 - protein, 8 aa, Artificial Sequence
  Representative cyclic modulating agent based on cadherin-6 cell adhesion recognition sequence
IFNIDSGN

SEQ ID NO: 1302 - protein, 9 aa, Artificial Sequence
  Representative cyclic modulating agent based on cadherin-6 cell adhesion recognition sequence
IFNIDSGNG

SEQ ID NO: 1303 - protein, 5 aa, Artificial Sequence
  Representative cyclic modulating agent based on cadherin-7 cell adhesion recognition sequence
CDENC

SEQ ID NO: 1304 - protein, 6 aa, Artificial Sequence
  Representative cyclic modulating agent based on cadherin-7 cell adhesion recognition sequence
CIDENC

SEQ ID NO: 1305 - protein, 6 aa, Artificial Sequence
  Representative cyclic modulating agent based on cadherin-7 cell adhesion recognition sequence
CDENTC

SEQ ID NO: 1306 - protein, 7 aa, Artificial Sequence
  Representative cyclic modulating agent based on cadherin-7 cell adhesion recognition sequence
CIIDENC

SEQ ID NO: 1307 - protein, 7 aa, Artificial Sequence
  Representative cyclic modulating agent based on cadherin-7 cell adhesion recognition sequence
CIDENTC

SEQ ID NO: 1308 - protein, 8 aa, Artificial Sequence
  Representative cyclic modulating agent based on cadherin-7 cell adhesion recognition sequence
CIIDENTC

SEQ ID NO: 1309 - protein, 7 aa, Artificial Sequence
  Representative cyclic modulating agent based on cadherin-7 cell adhesion recognition sequence
CDENTGC

SEQ ID NO: 1310 - protein, 8 aa, Artificial Sequence
  Representative cyclic modulating agent based on cadherin-7 cell adhesion recognition sequence
CIDENTGC

SEQ ID NO: 1311 - protein, 9 aa, Artificial Sequence
  Representative cyclic modulating agent based on cadherin-7 cell adhesion recognition sequence
CIIDENTGC

SEQ ID NO: 1312 - protein, 8 aa, Artificial Sequence
  Representative cyclic modulating agent based on cadherin-7 cell adhesion recognition sequence
CFIIDENC

SEQ ID NO: 1313 - protein, 9 aa, Artificial Sequence
  Representative cyclic modulating agent based on cadherin-7 cell adhesion recognition sequence
CFIIDENTC

SEQ ID NO: 1314 - protein, 10 aa, Artificial Sequence
  Representative cyclic modulating agent based on cadherin-7 cell adhesion recognition sequence
CFIIDENTGC

SEQ ID NO: 1315 - protein, 9 aa, Artificial Sequence
  Representative cyclic modulating agent based on cadherin-7 cell adhesion recognition sequence
CIFIIDENC

SEQ ID NO: 1316 - protein, 10 aa, Artificial Sequence
  Representative cyclic modulating agent based on cadherin-7 cell adhesion recognition sequence
CIFIIDENTC

SEQ ID NO: 1317 - protein, 11 aa, Artificial Sequence
  Representative cyclic modulating agent based on cadherin-7 cell adhesion recognition sequence
CIFIIDENTGC

SEQ ID NO: 1318 - protein, 6 aa, Artificial Sequence
  Representative cyclic modulating agent based on cadherin-7 cell adhesion recognition sequence
DDENTK

SEQ ID NO: 1319 - protein, 5 aa, Artificial Sequence
  Representative cyclic modulating agent based on cadherin-7 cell adhesion recognition sequence
DDENK

SEQ ID NO: 1320 - protein, 6 aa, Artificial Sequence
  Representative cyclic modulating agent based on cadherin-7 cell adhesion recognition sequence
DIDENK

SEQ ID NO: 1321 - protein, 7 aa, Artificial Sequence
  Representative cyclic modulating agent based on cadherin-7 cell adhesion recognition sequence
DIIDENK

SEQ ID NO: 1322 - protein, 8 aa, Artificial Sequence
  Representative cyclic modulating agent based on cadherin-7 cell adhesion recognition sequence
DFIIDENK

SEQ ID NO: 1323 - protein, 9 aa, Artificial Sequence
  Representative cyclic modulating agent based on cadherin-7 cell adhesion recognition sequence
DIFIIDENK

SEQ ID NO: 1324 - protein, 5 aa, Artificial Sequence
  Representative cyclic modulating agent based on cadherin-7 cell adhesion recognition sequence
EDENK

SEQ ID NO: 1325 - protein, 6 aa, Artificial Sequence
  Representative cyclic modulating agent based on cadherin-7 cell adhesion recognition sequence
EIDENK

SEQ ID NO: 1326 - protein, 7 aa, Artificial Sequence
  Representative cyclic modulating agent based on cadherin-7 cell adhesion recognition sequence
EIIDENK

SEQ ID NO: 1327 - protein, 8 aa, Artificial Sequence
  Representative cyclic modulating agent based on cadherin-7 cell adhesion recognition sequence
EFIIDENK

SEQ ID NO: 1328 - protein, 9 aa, Artificial Sequence
  Representative cyclic modulating agent based on cadherin-7 cell adhesion recognition sequence
EIFIIDENK

SEQ ID NO: 1329 - protein, 5 aa, Artificial Sequence
  Representative cyclic modulating agent based on cadherin-7 cell adhesion recognition sequence
KDEND

SEQ ID NO: 1330 - protein, 6 aa, Artificial Sequence
  Representative cyclic modulating agent based on cadherin-7 cell adhesion recognition sequence
KIDEND

SEQ ID NO: 1331 - protein, 6 aa, Artificial Sequence
  Representative cyclic modulating agent based on cadherin-7 cell adhesion recognition sequence
KDENTD

SEQ ID NO: 1332 - protein, 7 aa, Artificial Sequence
  Representative cyclic modulating agent based on cadherin-7 cell adhesion recognition sequence
KIIDEND

SEQ ID NO: 1333 - protein, 7 aa, Artificial Sequence
  Representative cyclic modulating agent based on cadherin-7 cell adhesion recognition sequence
KIDENTD

SEQ ID NO: 1334 - protein, 8 aa, Artificial Sequence
  Representative cyclic modulating agent based on cadherin-7 cell adhesion recognition sequence
KIIDENTD

SEQ ID NO: 1335 - protein, 7 aa, Artificial Sequence
  Representative cyclic modulating agent based on cadherin-7 cell adhesion recognition sequence
KDENTGD

SEQ ID NO: 1336 - protein, 8 aa, Artificial Sequence
  Representative cyclic modulating agent based on cadherin-7 cell adhesion recognition sequence
KIDENTGD

SEQ ID NO: 1337 - protein, 9 aa, Artificial Sequence
  Representative cyclic modulating agent based on cadherin-7 cell adhesion recognition sequence
KIIDENTGD

SEQ ID NO: 1338 - protein, 8 aa, Artificial Sequence
  Representative cyclic modulating agent based on cadherin-7 cell adhesion recognition sequence
KFIIDEND

SEQ ID NO: 1339 - protein, 9 aa, Artificial Sequence
  Representative cyclic modulating agent based on cadherin-7 cell adhesion recognition sequence
KFIIDENTD

SEQ ID NO: 1340 - protein, 10 aa, Artificial Sequence
  Representative cyclic modulating agent based on cadherin-7 cell adhesion recognition sequence
KFIIDENTGD

SEQ ID NO: 1341 - protein, 9 aa, Artificial Sequence
  Representative cyclic modulating agent based on cadherin-7 cell adhesion recognition sequence
KIFIIDEND

SEQ ID NO: 1342 - protein, 10 aa, Artificial Sequence
  Representative cyclic modulating agent based on cadherin-7 cell adhesion recognition sequence
KIFIIDENTD

SEQ ID NO: 1343 - protein, 11 aa, Artificial Sequence
  Representative cyclic modulating agent based on cadherin-7 cell adhesion recognition sequence
KIFIIDENTGD

SEQ ID NO: 1344 - protein, 7 aa, Artificial Sequence
  Representative cyclic modulating agent based on cadherin-7 cell adhesion recognition sequence
DIDENTK

SEQ ID NO: 1345 - protein, 5 aa, Artificial Sequence
  Representative cyclic modulating agent based on cadherin-7 cell adhesion recognition sequence
IDENT

SEQ ID NO: 1346 - protein, 6 aa, Artificial Sequence
  Representative cyclic modulating agent based on cadherin-7 cell adhesion recognition sequence
IIDENT

SEQ ID NO: 1347 - protein, 5 aa, Artificial Sequence
  Representative cyclic modulating agent based on cadherin-7 cell adhesion recognition sequence
DENTG

SEQ ID NO: 1348 - protein, 6 aa, Artificial Sequence
  Representative cyclic modulating agent based on cadherin-7 cell adhesion recognition sequence
IDENTG

SEQ ID NO: 1349 - protein, 5 aa, Artificial Sequence
  Representative cyclic modulating agent based on cadherin-7 cell adhesion recognition sequence
KDENE

SEQ ID NO: 1350 - protein, 6 aa, Artificial Sequence
  Representative cyclic modulating agent based on cadherin-7 cell adhesion recognition sequence
KIDENE

SEQ ID NO: 1351 - protein, 6 aa, Artificial Sequence
  Representative cyclic modulating agent based on cadherin-7 cell adhesion recognition sequence
KDENTE

SEQ ID NO: 1352 - protein, 7 aa, Artificial Sequence
  Representative cyclic modulating agent based on cadherin-7 cell adhesion recognition sequence
KIIDENE

SEQ ID NO: 1353 - protein, 7 aa, Artificial Sequence
  Representative cyclic modulating agent based on cadherin-7 cell adhesion recognition sequence
KIDENTE

SEQ ID NO: 1354 - protein, 8 aa, Artificial Sequence
  Representative cyclic modulating agent based on cadherin-7 cell adhesion recognition sequence
KIIDENTE

SEQ ID NO: 1355 - protein, 7 aa, Artificial Sequence
  Representative cyclic modulating agent based on cadherin-7 cell adhesion recognition sequence
KDENTGE

SEQ ID NO: 1356 - protein, 8 aa, Artificial Sequence
  Representative cyclic modulating agent based on cadherin-7 cell adhesion recognition sequence
KIDENTGE

SEQ ID NO: 1357 - protein, 9 aa, Artificial Sequence
  Representative cyclic modulating agent based on cadherin-7 cell adhesion recognition sequence
KIIDENTGE

SEQ ID NO: 1358 - protein, 8 aa, Artificial Sequence
  Representative cyclic modulating agent based on cadherin-7 cell adhesion recognition sequence
KFIIDENE

SEQ ID NO: 1359 - protein, 9 aa, Artificial Sequence
  Representative cyclic modulating agent based on cadherin-7 cell adhesion recognition sequence
KFIIDENTE

SEQ ID NO: 1360 - protein, 10 aa, Artificial Sequence
  Representative cyclic modulating agent based on cadherin-7 cell adhesion recognition sequence
KFIIDENTGE

SEQ ID NO: 1361 - protein, 9 aa, Artificial Sequence
  Representative cyclic modulating agent based on cadherin-7 cell adhesion recognition sequence
KIFIIDENE

SEQ ID NO: 1362 - protein, 10 aa, Artificial Sequence
  Representative cyclic modulating agent based on cadherin-7 cell adhesion recognition sequence
KIFIIDENTE

SEQ ID NO: 1363 - protein, 11 aa, Artificial Sequence
  Representative cyclic modulating agent based on cadherin-7 cell adhesion recognition sequence
KIFIIDENTGE

SEQ ID NO: 1364 - protein, 6 aa, Artificial Sequence
  Representative cyclic modulating agent based on cadherin-7 cell adhesion recognition sequence
DDENTK

SEQ ID NO: 1365 - protein, 5 aa, Artificial Sequence
  Representative cyclic modulating agent based on cadherin-7 cell adhesion recognition sequence
IIDEN

SEQ ID NO: 1366 - protein, 7 aa, Artificial Sequence
  Representative cyclic modulating agent based on cadherin-7 cell adhesion recognition sequence
IIDENTG

SEQ ID NO: 1367 - protein, 6 aa, Artificial Sequence
  Representative cyclic modulating agent based on cadherin-7 cell adhesion recognition sequence
FIIDEN

SEQ ID NO: 1368 - protein, 7 aa, Artificial Sequence
  Representative cyclic modulating agent based on cadherin-7 cell adhesion recognition sequence
FIIDENT

SEQ ID NO: 1369 - protein, 8 aa, Artificial Sequence
  Representative cyclic modulating agent based on cadherin-7 cell adhesion recognition sequence
FIIDENTG

SEQ ID NO: 1370 - protein, 7 aa, Artificial Sequence
  Representative cyclic modulating agent based on cadherin-7 cell adhesion recognition sequence
IFIIDEN

SEQ ID NO: 1371 - protein, 8 aa, Artificial Sequence
  Representative cyclic modulating agent based on cadherin-7 cell adhesion recognition sequence
IFIIDENT

SEQ ID NO: 1372 - protein, 9 aa, Artificial Sequence
  Representative cyclic modulating agent based on cadherin-7 cell adhesion recognition sequence
IFIIDENTG

SEQ ID NO: 1373 - protein, 5 aa, Artificial Sequence
  Representative cyclic modulating agent based on cadherin-7 cell adhesion recognition sequence
CEPKC

SEQ ID NO: 1374 - protein, 6 aa, Artificial Sequence
  Representative cyclic modulating agent based on cadherin-7 cell adhesion recognition sequence
CEPKTC

SEQ ID NO: 1375 - protein, 7 aa, Artificial Sequence
  Representative cyclic modulating agent based on cadherin-7 cell adhesion recognition sequence
CEPKTGC

SEQ ID NO: 1376 - protein, 6 aa, Artificial Sequence
  Representative cyclic modulating agent based on cadherin-7 cell adhesion recognition sequence
CVEPKC

SEQ ID NO: 1377 - protein, 7 aa, Artificial Sequence
  Representative cyclic modulating agent based on cadherin-7 cell adhesion recognition sequence
CVEPKTC

SEQ ID NO: 1378 - protein, 8 aa, Artificial Sequence
  Representative cyclic modulating agent based on cadherin-7 cell adhesion recognition sequence
CVEPKTGC

SEQ ID NO: 1379 - protein, 7 aa, Artificial Sequence
  Representative cyclic modulating agent based on cadherin-7 cell adhesion recognition sequence
CSVEPKC

SEQ ID NO: 1380 - protein, 8 aa, Artificial Sequence
  Representative cyclic modulating agent based on cadherin-7 cell adhesion recognition sequence
CSVEPKTC

SEQ ID NO: 1381 - protein, 9 aa, Artificial Sequence
  Representative cyclic modulating agent based on cadherin-7 cell adhesion recognition sequence
CSVEPKTGC

SEQ ID NO: 1382 - protein, 8 aa, Artificial Sequence
  Representative cyclic modulating agent based on cadherin-7 cell adhesion recognition sequence
CFSVEPKC

SEQ ID NO: 1383 - protein, 9 aa, Artificial Sequence
  Representative cyclic modulating agent based on cadherin-7 cell adhesion recognition sequence
CFSVEPKTC

SEQ ID NO: 1384 - protein, 10 aa, Artificial Sequence
  Representative cyclic modulating agent based on cadherin-7 cell adhesion recognition sequence
CFSVEPKTGC

SEQ ID NO: 1385 - protein, 9 aa, Artificial Sequence
  Representative cyclic modulating agent based on cadherin-7 cell adhesion recognition sequence
CYFSVEPKC

SEQ ID NO: 1386 - protein, 10 aa, Artificial Sequence
  Representative cyclic modulating agent based on cadherin-7 cell adhesion recognition sequence
CYFSVEPKTC

SEQ ID NO: 1387 - protein, 11 aa, Artificial Sequence
  Representative cyclic modulating agent based on cadherin-7 cell adhesion recognition sequence
CYFSVEPKTGC

SEQ ID NO: 1388 - protein, 5 aa, Artificial Sequence
  Representative cyclic modulating agent based on cadherin-7 cell adhesion recognition sequence
CDANC

SEQ ID NO: 1389 - protein, 6 aa, Artificial Sequence
  Representative cyclic modulating agent based on cadherin-7 cell adhesion recognition sequence
CDANSC

SEQ ID NO: 1390 - protein, 7 aa, Artificial Sequence
  Representative cyclic modulating agent based on cadherin-7 cell adhesion recognition sequence
CDANSGC

SEQ ID NO: 1391 - protein, 6 aa, Artificial Sequence
  Representative cyclic modulating agent based on cadherin-7 cell adhesion recognition sequence
CIDANC

SEQ ID NO: 1392 - protein, 7 aa, Artificial Sequence
  Representative cyclic modulating agent based on cadherin-7 cell adhesion recognition sequence
CIDANSC

SEQ ID NO: 1393 - protein, 8 aa, Artificial Sequence
  Representative cyclic modulating agent based on cadherin-7 cell adhesion recognition sequence
CIDANSGC

SEQ ID NO: 1394 - protein, 7 aa, Artificial Sequence
  Representative cyclic modulating agent based on cadherin-7 cell adhesion recognition sequence
CNIDANC

SEQ ID NO: 1395 - protein, 8 aa, Artificial Sequence
  Representative cyclic modulating agent based on cadherin-7 cell adhesion recognition sequence
CNIDANSC

SEQ ID NO: 1396 - protein, 9 aa, Artificial Sequence
  Representative cyclic modulating agent based on cadherin-7 cell adhesion recognition sequence
CNIDANSGC

SEQ ID NO: 1397 - protein, 8 aa, Artificial Sequence
  Representative cyclic modulating agent based on cadherin-7 cell adhesion recognition sequence
CFNIDANC

SEQ ID NO: 1398 - protein, 9 aa, Artificial Sequence
  Representative cyclic modulating agent based on cadherin-7 cell adhesion recognition sequence
CFNIDANSC

SEQ ID NO: 1399 - protein, 10 aa, Artificial Sequence
  Representative cyclic modulating agent based on cadherin-7 cell adhesion recognition sequence
CFNIDANSGC

SEQ ID NO: 1400 - protein, 9 aa, Artificial Sequence
  Representative cyclic modulating agent based on cadherin-7 cell adhesion recognition sequence
CYFNIDANC

SEQ ID NO: 1401 - protein, 10 aa, Artificial Sequence
  Representative cyclic modulating agent based on cadherin-7 cell adhesion recognition sequence
CYFNIDANSC

SEQ ID NO: 1402 - protein, 11 aa, Artificial Sequence
  Representative cyclic modulating agent based on cadherin-7 cell adhesion recognition sequence
CYFNIDANSGC

SEQ ID NO: 1403 - protein, 5 aa, Artificial Sequence
  Representative cyclic modulating agent based on cadherin-7 cell adhesion recognition sequence
EEPKK

SEQ ID NO: 1404 - protein, 6 aa, Artificial Sequence
  Representative cyclic modulating agent based on cadherin-7 cell adhesion recognition sequence
EEPKTK

SEQ ID NO: 1405 - protein, 7 aa, Artificial Sequence
  Representative cyclic modulating agent based on cadherin-7 cell adhesion recognition sequence
EEPKTGK

SEQ ID NO: 1406 - protein, 6 aa, Artificial Sequence
  Representative cyclic modulating agent based on cadherin-7 cell adhesion recognition sequence
EVEPKK

SEQ ID NO: 1407 - protein, 7 aa, Artificial Sequence
  Representative cyclic modulating agent based on cadherin-7 cell adhesion recognition sequence
EVEPKTK

SEQ ID NO: 1408 - protein, 8 aa, Artificial Sequence
  Representative cyclic modulating agent based on cadherin-7 cell adhesion recognition sequence
EVEPKTGK

SEQ ID NO: 1409 - protein, 7 aa, Artificial Sequence
  Representative cyclic modulating agent based on cadherin-7 cell adhesion recognition sequence
ESVEPKK

SEQ ID NO: 1410 - protein, 8 aa, Artificial Sequence
  Representative cyclic modulating agent based on cadherin-7 cell adhesion recognition sequence
ESVEPKTK

SEQ ID NO: 1411 - protein, 9 aa, Artificial Sequence
  Representative cyclic modulating agent based on cadherin-7 cell adhesion recognition sequence
ESVEPKTGK

SEQ ID NO: 1412 - protein, 8 aa, Artificial Sequence
  Representative cyclic modulating agent based on cadherin-7 cell adhesion recognition sequence
EFSVEPKK

SEQ ID NO: 1413 - protein, 9 aa, Artificial Sequence
  Representative cyclic modulating agent based on cadherin-7 cell adhesion recognition sequence
EFSVEPKTK

SEQ ID NO: 1414 - protein, 10 aa, Artificial Sequence
  Representative cyclic modulating agent based on cadherin-7 cell adhesion recognition sequence
EFSVEPKTGK

SEQ ID NO: 1415 - protein, 9 aa, Artificial Sequence
  Representative cyclic modulating agent based on cadherin-7 cell adhesion recognition sequence
EYFSVEPKK

SEQ ID NO: 1416 - protein, 10 aa, Artificial Sequence
  Representative cyclic modulating agent based on cadherin-7 cell adhesion recognition sequence
EYFSVEPKTK

SEQ ID NO: 1417 - protein, 11 aa, Artificial Sequence
  Representative cyclic modulating agent based on cadherin-7 cell adhesion recognition sequence
EYFSVEPKTGK

SEQ ID NO: 1418 - protein, 5 aa, Artificial Sequence
  Representative cyclic modulating agent based on cadherin-7 cell adhesion recognition sequence
EDANK

SEQ ID NO: 1419 - protein, 6 aa, Artificial Sequence
  Representative cyclic modulating agent based on cadherin-7 cell adhesion recognition sequence
EDANSK

SEQ ID NO: 1420 - protein, 7 aa, Artificial Sequence
  Representative cyclic modulating agent based on cadherin-7 cell adhesion recognition sequence
EDANSGK

SEQ ID NO: 1421 - protein, 6 aa, Artificial Sequence
  Representative cyclic modulating agent based on cadherin-7 cell adhesion recognition sequence
EIDANK

SEQ ID NO: 1422 - protein, 7 aa, Artificial Sequence
  Representative cyclic modulating agent based on cadherin-7 cell adhesion recognition sequence
EIDANSK

SEQ ID NO: 1423 - protein, 8 aa, Artificial Sequence
  Representative cyclic modulating agent based on cadherin-7 cell adhesion recognition sequence
EIDANSGK

SEQ ID NO: 1424 - protein, 7 aa, Artificial Sequence
  Representative cyclic modulating agent based on cadherin-7 cell adhesion recognition sequence
ENIDANK

SEQ ID NO: 1425 - protein, 8 aa, Artificial Sequence
  Representative cyclic modulating agent based on cadherin-7 cell adhesion recognition sequence
ENIDANSK

SEQ ID NO: 1426 - protein, 9 aa, Artificial Sequence
  Representative cyclic modulating agent based on cadherin-7 cell adhesion recognition sequence
ENIDANSGK

SEQ ID NO: 1427 - protein, 8 aa, Artificial Sequence
  Representative cyclic modulating agent based on cadherin-7 cell adhesion recognition sequence
EFNIDANK

SEQ ID NO: 1428 - protein, 9 aa, Artificial Sequence
  Representative cyclic modulating agent based on cadherin-7 cell adhesion recognition sequence
EFNIDANSK

SEQ ID NO: 1429 - protein, 10 aa, Artificial Sequence
  Representative cyclic modulating agent based on cadherin-7 cell adhesion recognition sequence
EFNIDANSGK

SEQ ID NO: 1430 - protein, 9 aa, Artificial Sequence
  Representative cyclic modulating agent based on cadherin-7 cell adhesion recognition sequence
EYFNIDANK

SEQ ID NO: 1431 - protein, 10 aa, Artificial Sequence
  Representative cyclic modulating agent based on cadherin-7 cell adhesion recognition sequence
EYFNIDANSK

SEQ ID NO: 1432 - protein, 11 aa, Artificial Sequence
  Representative cyclic modulating agent based on cadherin-7 cell adhesion recognition sequence
EYFNIDANSGK

SEQ ID NO: 1433 - protein, 5 aa, Artificial Sequence
  Representative cyclic modulating agent based on cadherin-7 cell adhesion recognition sequence
KDAND

SEQ ID NO: 1434 - protein, 6 aa, Artificial Sequence
  Representative cyclic modulating agent based on cadherin-7 cell adhesion recognition sequence
KIDAND

SEQ ID NO: 1435 - protein, 6 aa, Artificial Sequence
  Representative cyclic modulating agent based on cadherin-7 cell adhesion recognition sequence
KDANSD

SEQ ID NO: 1436 - protein, 7 aa, Artificial Sequence
  Representative cyclic modulating agent based on cadherin-7 cell adhesion recognition sequence
KNIDAND

SEQ ID NO: 1437 - protein, 7 aa, Artificial Sequence
  Representative cyclic modulating agent based on cadherin-7 cell adhesion recognition sequence
KIDANSD

SEQ ID NO: 1438 - protein, 8 aa, Artificial Sequence
  Representative cyclic modulating agent based on cadherin-7 cell adhesion recognition sequence
KNIDANSD

SEQ ID NO: 1439 - protein, 7 aa, Artificial Sequence
  Representative cyclic modulating agent based on cadherin-7 cell adhesion recognition sequence
KDANSGD

SEQ ID NO: 1440 - protein, 8 aa, Artificial Sequence
  Representative cyclic modulating agent based on cadherin-7 cell adhesion recognition sequence
KIDANSGD

SEQ ID NO: 1441 - protein, 9 aa, Artificial Sequence
  Representative cyclic modulating agent based on cadherin-7 cell adhesion recognition sequence
KNIDANSGD

SEQ ID NO: 1442 - protein, 8 aa, Artificial Sequence
  Representative cyclic modulating agent based on cadherin-7 cell adhesion recognition sequence
KFNIDAND

SEQ ID NO: 1443 - protein, 9 aa, Artificial Sequence
  Representative cyclic modulating agent based on cadherin-7 cell adhesion recognition sequence
KFNIDANSD

SEQ ID NO: 1444 - protein, 10 aa, Artificial Sequence
  Representative cyclic modulating agent based on cadherin-7 cell adhesion recognition sequence
KFNIDANSGD

SEQ ID NO: 1445 - protein, 9 aa, Artificial Sequence
  Representative cyclic modulating agent based on cadherin-7 cell adhesion recognition sequence
KYFNIDAND

SEQ ID NO: 1446 - protein, 10 aa, Artificial Sequence
  Representative cyclic modulating agent based on cadherin-7 cell adhesion recognition sequence
KYFNIDANSD

SEQ ID NO: 1447 - protein, 11 aa, Artificial Sequence
  Representative cyclic modulating agent based on cadherin-7 cell adhesion recognition sequence
KYFNIDANSGD

SEQ ID NO: 1448 - protein, 5 aa, Artificial Sequence
  Representative cyclic modulating agent based on cadherin-7 cell adhesion recognition sequence
KEPKD

SEQ ID NO: 1449 - protein, 6 aa, Artificial Sequence
  Representative cyclic modulating agent based on cadherin-7 cell adhesion recognition sequence
KEPKTD

SEQ ID NO: 1450 - protein, 7 aa, Artificial Sequence
  Representative cyclic modulating agent based on cadherin-7 cell adhesion recognition sequence
KEPKTGD

SEQ ID NO: 1451 - protein, 6 aa, Artificial Sequence
  Representative cyclic modulating agent based on cadherin-7 cell adhesion recognition sequence
KVEPKD

SEQ ID NO: 1452 - protein, 7 aa, Artificial Sequence
  Representative cyclic modulating agent based on cadherin-7 cell adhesion recognition sequence
KVEPKTD

SEQ ID NO: 1453 - protein, 8 aa, Artificial Sequence
  Representative cyclic modulating agent based on cadherin-7 cell adhesion recognition sequence
KVEPKTGD

SEQ ID NO: 1454 - protein, 7 aa, Artificial Sequence
  Representative cyclic modulating agent based on cadherin-7 cell adhesion recognition sequence
KSVEPKD

SEQ ID NO: 1455 - protein, 8 aa, Artificial Sequence
  Representative cyclic modulating agent based on cadherin-7 cell adhesion recognition sequence
KSVEPKTD

SEQ ID NO: 1456 - protein, 9 aa, Artificial Sequence
  Representative cyclic modulating agent based on cadherin-7 cell adhesion recognition sequence
KSVEPKTGD

SEQ ID NO: 1457 - protein, 8 aa, Artificial Sequence
  Representative cyclic modulating agent based on cadherin-7 cell adhesion recognition sequence
KFSVEPKD

SEQ ID NO: 1458 - protein, 9 aa, Artificial Sequence
  Representative cyclic modulating agent based on cadherin-7 cell adhesion recognition sequence
KFSVEPKTD

SEQ ID NO: 1459 - protein, 10 aa, Artificial Sequence
  Representative cyclic modulating agent based on cadherin-7 cell adhesion recognition sequence
KFSVEPKTGD

SEQ ID NO: 1460 - protein, 9 aa, Artificial Sequence
  Representative cyclic modulating agent based on cadherin-7 cell adhesion recognition sequence
KYFSVEPKD

SEQ ID NO: 1461 - protein, 10 aa, Artificial Sequence
  Representative cyclic modulating agent based on cadherin-7 cell adhesion recognition sequence
KYFSVEPKTD

SEQ ID NO: 1462 - protein, 11 aa, Artificial Sequence
  Representative cyclic modulating agent based on cadherin-7 cell adhesion recognition sequence
KYFSVEPKTGD

SEQ ID NO: 1463 - protein, 5 aa, Artificial Sequence
  Representative cyclic modulating agent based on cadherin-7 cell adhesion recognition sequence
KDAND

SEQ ID NO: 1464 - protein, 6 aa, Artificial Sequence
  Representative cyclic modulating agent based on cadherin-7 cell adhesion recognition sequence
KDANSD

SEQ ID NO: 1465 - protein, 7 aa, Artificial Sequence
  Representative cyclic modulating agent based on cadherin-7 cell adhesion recognition sequence
KDANSGD

SEQ ID NO: 1466 - protein, 6 aa, Artificial Sequence
  Representative cyclic modulating agent based on cadherin-7 cell adhesion recognition sequence
KIDAND

SEQ ID NO: 1467 - protein, 7 aa, Artificial Sequence
  Representative cyclic modulating agent based on cadherin-7 cell adhesion recognition sequence
KIDANSD

SEQ ID NO: 1468 - protein, 8 aa, Artificial Sequence
  Representative cyclic modulating agent based on cadherin-7 cell adhesion recognition sequence
KIDANSGD

SEQ ID NO: 1469 - protein, 7 aa, Artificial Sequence
  Representative cyclic modulating agent based on cadherin-7 cell adhesion recognition sequence
KNIDAND

SEQ ID NO: 1470 - protein, 8 aa, Artificial Sequence
  Representative cyclic modulating agent based on cadherin-7 cell adhesion recognition sequence
KNIDANSD

SEQ ID NO: 1471 - protein, 9 aa, Artificial Sequence
  Representative cyclic modulating agent based on cadherin-7 cell adhesion recognition sequence
KNIDANSGD

SEQ ID NO: 1472 - protein, 8 aa, Artificial Sequence
  Representative cyclic modulating agent based on cadherin-7 cell adhesion recognition sequence
KFNIDAND

SEQ ID NO: 1473 - protein, 9 aa, Artificial Sequence
  Representative cyclic modulating agent based on cadherin-7 cell adhesion recognition sequence
KFNIDANSD

SEQ ID NO: 1474 - protein, 10 aa, Artificial Sequence
  Representative cyclic modulating agent based on cadherin-7 cell adhesion recognition sequence
KFNIDANSGD

SEQ ID NO: 1475 - protein, 9 aa, Artificial Sequence
  Representative cyclic modulating agent based on cadherin-7 cell adhesion recognition sequence
KYFNIDAND

SEQ ID NO: 1476 - protein, 10 aa, Artificial Sequence
  Representative cyclic modulating agent based on cadherin-7 cell adhesion recognition sequence
KYFNIDANSD

SEQ ID NO: 1477 - protein, 11 aa, Artificial Sequence
  Representative cyclic modulating agent based on cadherin-7 cell adhesion recognition sequence
KYFNIDANSGD

SEQ ID NO: 1478 - protein, 5 aa, Artificial Sequence
  Representative cyclic modulating agent based on cadherin-7 cell adhesion recognition sequence
DEPKK

SEQ ID NO: 1479 - protein, 6 aa, Artificial Sequence
  Representative cyclic modulating agent based on cadherin-7 cell adhesion recognition sequence
DEPKTK

SEQ ID NO: 1480 - protein, 7 aa, Artificial Sequence
  Representative cyclic modulating agent based on cadherin-7 cell adhesion recognition sequence
DEPKTGK

SEQ ID NO: 1481 - protein, 6 aa, Artificial Sequence
  Representative cyclic modulating agent based on cadherin-7 cell adhesion recognition sequence
DVEPKK

SEQ ID NO: 1482 - protein, 7 aa, Artificial Sequence
  Representative cyclic modulating agent based on cadherin-7 cell adhesion recognition sequence
DVEPKTK

SEQ ID NO: 1483 - protein, 8 aa, Artificial Sequence
  Representative cyclic modulating agent based on cadherin-7 cell adhesion recognition sequence
DVEPKTGK

SEQ ID NO: 1484 - protein, 7 aa, Artificial Sequence
  Representative cyclic modulating agent based on cadherin-7 cell adhesion recognition sequence
DSVEPKK

SEQ ID NO: 1485 - protein, 8 aa, Artificial Sequence
  Representative cyclic modulating agent based on cadherin-7 cell adhesion recognition sequence
DSVEPKTK

SEQ ID NO: 1486 - protein, 9 aa, Artificial Sequence
  Representative cyclic modulating agent based on cadherin-7 cell adhesion recognition sequence
DSVEPKTGK

SEQ ID NO: 1487 - protein, 8 aa, Artificial Sequence
  Representative cyclic modulating agent based on cadherin-7 cell adhesion recognition sequence
DFSVEPKK

SEQ ID NO: 1488 - protein, 9 aa, Artificial Sequence
  Representative cyclic modulating agent based on cadherin-7 cell adhesion recognition sequence
DFSVEPKTK

SEQ ID NO: 1489 - protein, 10 aa, Artificial Sequence
  Representative cyclic modulating agent based on cadherin-7 cell adhesion recognition sequence
DFSVEPKTGK

SEQ ID NO: 1490 - protein, 9 aa, Artificial Sequence
  Representative cyclic modulating agent based on cadherin-7 cell adhesion recognition sequence
DYFSVEPKK

SEQ ID NO: 1491 - protein, 10 aa, Artificial Sequence
  Representative cyclic modulating agent based on cadherin-7 cell adhesion recognition sequence
DYFSVEPKTK

SEQ ID NO: 1492 - protein, 11 aa, Artificial Sequence
  Representative cyclic modulating agent based on cadherin-7 cell adhesion recognition sequence
DYFSVEPKTGK

SEQ ID NO: 1493 - protein, 5 aa, Artificial Sequence
  Representative cyclic modulating agent based on cadherin-7 cell adhesion recognition sequence
DDANK

SEQ ID NO: 1494 - protein, 6 aa, Artificial Sequence
  Representative cyclic modulating agent based on cadherin-7 cell adhesion recognition sequence
DDANSK

SEQ ID NO: 1495 - protein, 7 aa, Artificial Sequence
  Representative cyclic modulating agent based on cadherin-7 cell adhesion recognition sequence
DDANSGK

SEQ ID NO: 1496 - protein, 6 aa, Artificial Sequence
  Representative cyclic modulating agent based on cadherin-7 cell adhesion recognition sequence
DIDANK

SEQ ID NO: 1497 - protein, 7 aa, Artificial Sequence
  Representative cyclic modulating agent based on cadherin-7 cell adhesion recognition sequence
DIDANSK

SEQ ID NO: 1498 - protein, 8 aa, Artificial Sequence
  Representative cyclic modulating agent based on cadherin-7 cell adhesion recognition sequence
DIDANSGK

SEQ ID NO: 1499 - protein, 7 aa, Artificial Sequence
  Representative cyclic modulating agent based on cadherin-7 cell adhesion recognition sequence
DNIDANK

SEQ ID NO: 1500 - protein, 8 aa, Artificial Sequence
  Representative cyclic modulating agent based on cadherin-7 cell adhesion recognition sequence
DNIDANSK

SEQ ID NO: 1501 - protein, 9 aa, Artificial Sequence
  Representative cyclic modulating agent based on cadherin-7 cell adhesion recognition sequence
DNIDANSGK

SEQ ID NO: 1502 - protein, 8 aa, Artificial Sequence
  Representative cyclic modulating agent based on cadherin-7 cell adhesion recognition sequence
DFNIDANK

SEQ ID NO: 1503 - protein, 9 aa, Artificial Sequence
  Representative cyclic modulating agent based on cadherin-7 cell adhesion recognition sequence
DFNIDANSK

SEQ ID NO: 1504 - protein, 10 aa, Artificial Sequence
  Representative cyclic modulating agent based on cadherin-7 cell adhesion recognition sequence
DFNIDANSGK

SEQ ID NO: 1505 - protein, 9 aa, Artificial Sequence
  Representative cyclic modulating agent based on cadherin-7 cell adhesion recognition sequence
DYFNIDANK

SEQ ID NO: 1506 - protein, 10 aa, Artificial Sequence
  Representative cyclic modulating agent based on cadherin-7 cell adhesion recognition sequence
DYFNIDANSK

SEQ ID NO: 1507 - protein, 11 aa, Artificial Sequence
  Representative cyclic modulating agent based on cadherin-7 cell adhesion recognition sequence
DYFNIDANSGK

SEQ ID NO: 1508 - protein, 5 aa, Artificial Sequence
  Representative cyclic modulating agent based on cadherin-7 cell adhesion recognition sequence
KDENE

SEQ ID NO: 1509 - protein, 6 aa, Artificial Sequence
  Representative cyclic modulating agent based on cadherin-7 cell adhesion recognition sequence
KDENTE

SEQ ID NO: 1510 - protein, 7 aa, Artificial Sequence
  Representative cyclic modulating agent based on cadherin-7 cell adhesion recognition sequence
KDENTGE

SEQ ID NO: 1511 - protein, 6 aa, Artificial Sequence
  Representative cyclic modulating agent based on cadherin-7 cell adhesion recognition sequence
KIDENE

SEQ ID NO: 1512 - protein, 7 aa, Artificial Sequence
  Representative cyclic modulating agent based on cadherin-7 cell adhesion recognition sequence
KIDENTE

SEQ ID NO: 1513 - protein, 8 aa, Artificial Sequence
  Representative cyclic modulating agent based on cadherin-7 cell adhesion recognition sequence
KIDENTGE

SEQ ID NO: 1514 - protein, 7 aa, Artificial Sequence
  Representative cyclic modulating agent based on cadherin-7 cell adhesion recognition sequence
KIIDENE

SEQ ID NO: 1515 - protein, 8 aa, Artificial Sequence
  Representative cyclic modulating agent based on cadherin-7 cell adhesion recognition sequence
KIIDENTE

SEQ ID NO: 1516 - protein, 9 aa, Artificial Sequence
  Representative cyclic modulating agent based on cadherin-7 cell adhesion recognition sequence
KIIDENTGE

SEQ ID NO: 1517 - protein, 8 aa, Artificial Sequence
  Representative cyclic modulating agent based on cadherin-7 cell adhesion recognition sequence
KFIIDENE

SEQ ID NO: 1518 - protein, 9 aa, Artificial Sequence
  Representative cyclic modulating agent based on cadherin-7 cell adhesion recognition sequence
KFIIDENTE

SEQ ID NO: 1519 - protein, 10 aa, Artificial Sequence
  Representative cyclic modulating agent based on cadherin-7 cell adhesion recognition sequence
KFIIDENTGE

SEQ ID NO: 1520 - protein, 9 aa, Artificial Sequence
  Representative cyclic modulating agent based on cadherin-7 cell adhesion recognition sequence
KIFIIDENE

SEQ ID NO: 1521 - protein, 10 aa, Artificial Sequence
  Representative cyclic modulating agent based on cadherin-7 cell adhesion recognition sequence
KIFIIDENTE

SEQ ID NO: 1522 - protein, 11 aa, Artificial Sequence
  Representative cyclic modulating agent based on cadherin-7 cell adhesion recognition sequence
KIFIIDENTGE

SEQ ID NO: 1523 - protein, 5 aa, Artificial Sequence
  Representative cyclic modulating agent based on cadherin-7 cell adhesion recognition sequence
KEPKE

SEQ ID NO: 1524 - protein, 6 aa, Artificial Sequence
  Representative cyclic modulating agent based on cadherin-7 cell adhesion recognition sequence
KEPKTE

SEQ ID NO: 1525 - protein, 7 aa, Artificial Sequence
  Representative cyclic modulating agent based on cadherin-7 cell adhesion recognition sequence
KEPKTGE

SEQ ID NO: 1526 - protein, 6 aa, Artificial Sequence
  Representative cyclic modulating agent based on cadherin-7 cell adhesion recognition sequence
KVEPKE

SEQ ID NO: 1527 - protein, 7 aa, Artificial Sequence
  Representative cyclic modulating agent based on cadherin-7 cell adhesion recognition sequence
KVEPKTE

SEQ ID NO: 1528 - protein, 8 aa, Artificial Sequence
  Representative cyclic modulating agent based on cadherin-7 cell adhesion recognition sequence
KVEPKTGE

SEQ ID NO: 1529 - protein, 7 aa, Artificial Sequence
  Representative cyclic modulating agent based on cadherin-7 cell adhesion recognition sequence
KSVEPKE

SEQ ID NO: 1530 - protein, 8 aa, Artificial Sequence
  Representative cyclic modulating agent based on cadherin-7 cell adhesion recognition sequence
KSVEPKTE

SEQ ID NO: 1531 - protein, 9 aa, Artificial Sequence
  Representative cyclic modulating agent based on cadherin-7 cell adhesion recognition sequence
KSVEPKTGE

SEQ ID NO: 1532 - protein, 8 aa, Artificial Sequence
  Representative cyclic modulating agent based on cadherin-7 cell adhesion recognition sequence
KFSVEPKE

SEQ ID NO: 1533 - protein, 9 aa, Artificial Sequence
  Representative cyclic modulating agent based on cadherin-7 cell adhesion recognition sequence
KFSVEPKTE

SEQ ID NO: 1534 - protein, 10 aa, Artificial Sequence
  Representative cyclic modulating agent based on cadherin-7 cell adhesion recognition sequence
KFSVEPKTGE

SEQ ID NO: 1535 - protein, 9 aa, Artificial Sequence
  Representative cyclic modulating agent based on cadherin-7 cell adhesion recognition sequence
KYFSVEPKE

SEQ ID NO: 1536 - protein, 10 aa, Artificial Sequence
  Representative cyclic modulating agent based on cadherin-7 cell adhesion recognition sequence
KYFSVEPKTE

SEQ ID NO: 1537 - protein, 11 aa, Artificial Sequence
  Representative cyclic modulating agent based on cadherin-7 cell adhesion recognition sequence
KYFSVEPKTGE

SEQ ID NO: 1538 - protein, 5 aa, Artificial Sequence
  Representative cyclic modulating agent based on cadherin-7 cell adhesion recognition sequence
KDANE

SEQ ID NO: 1539 - protein, 6 aa, Artificial Sequence
  Representative cyclic modulating agent based on cadherin-7 cell adhesion recognition sequence
KDANSE

SEQ ID NO: 1540 - protein, 7 aa, Artificial Sequence
  Representative cyclic modulating agent based on cadherin-7 cell adhesion recognition sequence
KDANSGE

SEQ ID NO: 1541 - protein, 6 aa, Artificial Sequence
  Representative cyclic modulating agent based on cadherin-7 cell adhesion recognition sequence
KIDANE

SEQ ID NO: 1542 - protein, 7 aa, Artificial Sequence
  Representative cyclic modulating agent based on cadherin-7 cell adhesion recognition sequence
KIDANSE

SEQ ID NO: 1543 - protein, 8 aa, Artificial Sequence
  Representative cyclic modulating agent based on cadherin-7 cell adhesion recognition sequence
KIDANSGE

SEQ ID NO: 1544 - protein, 7 aa, Artificial Sequence
  Representative cyclic modulating agent based on cadherin-7 cell adhesion recognition sequence
KNIDANE

SEQ ID NO: 1545 - protein, 8 aa, Artificial Sequence
  Representative cyclic modulating agent based on cadherin-7 cell adhesion recognition sequence
KNIDANSE

SEQ ID NO: 1546 - protein, 9 aa, Artificial Sequence
  Representative cyclic modulating agent based on cadherin-7 cell adhesion recognition sequence
KNIDANSGE

SEQ ID NO: 1547 - protein, 8 aa, Artificial Sequence
  Representative cyclic modulating agent based on cadherin-7 cell adhesion recognition sequence
KFNIDANE

SEQ ID NO: 1548 - protein, 9 aa, Artificial Sequence
  Representative cyclic modulating agent based on cadherin-7 cell adhesion recognition sequence
KFNIDANSE

SEQ ID NO: 1549 - protein, 10 aa, Artificial Sequence
  Representative cyclic modulating agent based on cadherin-7 cell adhesion recognition sequence
KFNIDANSGE

SEQ ID NO: 1550 - protein, 9 aa, Artificial Sequence
  Representative cyclic modulating agent based on cadherin-7 cell adhesion recognition sequence
KYFNIDANE

SEQ ID NO: 1551 - protein, 10 aa, Artificial Sequence
  Representative cyclic modulating agent based on cadherin-7 cell adhesion recognition sequence
KYFNIDANSE

SEQ ID NO: 1552 - protein, 11 aa, Artificial Sequence
  Representative cyclic modulating agent based on cadherin-7 cell adhesion recognition sequence
KYFNIDANSGE

SEQ ID NO: 1553 - protein, 5 aa, Artificial Sequence
  Representative cyclic modulating agent based on cadherin-7 cell adhesion recognition sequence
DENTG

SEQ ID NO: 1554 - protein, 5 aa, Artificial Sequence
  Representative cyclic modulating agent based on cadherin-7 cell adhesion recognition sequence
IDENT

SEQ ID NO: 1555 - protein, 6 aa, Artificial Sequence
  Representative cyclic modulating agent based on cadherin-7 cell adhesion recognition sequence
IDENTG

SEQ ID NO: 1556 - protein, 5 aa, Artificial Sequence
  Representative cyclic modulating agent based on cadherin-7 cell adhesion recognition sequence
IIDEN

SEQ ID NO: 1557 - protein, 6 aa, Artificial Sequence
  Representative cyclic modulating agent based on cadherin-7 cell adhesion recognition sequence
IIDENT

SEQ ID NO: 1558 - protein, 7 aa, Artificial Sequence
  Representative cyclic modulating agent based on cadherin-7 cell adhesion recognition sequence
IIDENTG

SEQ ID NO: 1559 - protein, 6 aa, Artificial Sequence
  Representative cyclic modulating agent based on cadherin-7 cell adhesion recognition sequence
FIIDEN

SEQ ID NO: 1560 - protein, 7 aa, Artificial Sequence
  Representative cyclic modulating agent based on cadherin-7 cell adhesion recognition sequence
FIIDENT

SEQ ID NO: 1561 - protein, 8 aa, Artificial Sequence
  Representative cyclic modulating agent based on cadherin-7 cell adhesion recognition sequence
FIIDENTG

SEQ ID NO: 1562 - protein, 7 aa, Artificial Sequence
  Representative cyclic modulating agent based on cadherin-7 cell adhesion recognition sequence
IFIIDEN

SEQ ID NO: 1563 - protein, 8 aa, Artificial Sequence
  Representative cyclic modulating agent based on cadherin-7 cell adhesion recognition sequence
IFIIDENT

SEQ ID NO: 1564 - protein, 9 aa, Artificial Sequence
  Representative cyclic modulating agent based on cadherin-7 cell adhesion recognition sequence
IFIIDENTG

SEQ ID NO: 1565 - protein, 5 aa, Artificial Sequence
  Representative cyclic modulating agent based on cadherin-7 cell adhesion recognition sequence
EPKTG

SEQ ID NO: 1566 - protein, 5 aa, Artificial Sequence
  Representative cyclic modulating agent based on cadherin-7 cell adhesion recognition sequence
VEPKT

SEQ ID NO: 1567 - protein, 6 aa, Artificial Sequence
  Representative cyclic modulating agent based on cadherin-7 cell adhesion recognition sequence
VEPKTG

SEQ ID NO: 1568 - protein, 5 aa, Artificial Sequence
  Representative cyclic modulating agent based on cadherin-7 cell adhesion recognition sequence
SVEPK

SEQ ID NO: 1569 - protein, 6 aa, Artificial Sequence
  Representative cyclic modulating agent based on cadherin-7 cell adhesion recognition sequence
SVEPKT

SEQ ID NO: 1570 - protein, 7 aa, Artificial Sequence
  Representative cyclic modulating agent based on cadherin-7 cell adhesion recognition sequence
SVEPKTG

SEQ ID NO: 1571 - protein, 6 aa, Artificial Sequence
  Representative cyclic modulating agent based on cadherin-7 cell adhesion recognition sequence
FSVEPK

SEQ ID NO: 1572 - protein, 7 aa, Artificial Sequence
  Representative cyclic modulating agent based on cadherin-7 cell adhesion recognition sequence
FSVEPKT

SEQ ID NO: 1573 - protein, 8 aa, Artificial Sequence
  Representative cyclic modulating agent based on cadherin-7 cell adhesion recognition sequence
FSVEPKTG

SEQ ID NO: 1574 - protein, 7 aa, Artificial Sequence
  Representative cyclic modulating agent based on cadherin-7 cell adhesion recognition sequence
YFSVEPK

SEQ ID NO: 1575 - protein, 8 aa, Artificial Sequence
  Representative cyclic modulating agent based on cadherin-7 cell adhesion recognition sequence
YFSVEPKT

SEQ ID NO: 1576 - protein, 9 aa, Artificial Sequence
  Representative cyclic modulating agent based on cadherin-7 cell adhesion recognition sequence
YFSVEPKTG

SEQ ID NO: 1577 - protein, 5 aa, Artificial Sequence
  Representative cyclic modulating agent based on cadherin-7 cell adhesion recognition sequence
DANSG

SEQ ID NO: 1578 - protein, 5 aa, Artificial Sequence
  Representative cyclic modulating agent based on cadherin-7 cell adhesion recognition sequence
IDANS

SEQ ID NO: 1579 - protein, 6 aa, Artificial Sequence
  Representative cyclic modulating agent based on cadherin-7 cell adhesion recognition sequence
IDANSG

SEQ ID NO: 1580 - protein, 5 aa, Artificial Sequence
  Representative cyclic modulating agent based on cadherin-7 cell adhesion recognition sequence
NIDAN

SEQ ID NO: 1581 - protein, 6 aa, Artificial Sequence
  Representative cyclic modulating agent based on cadherin-7 cell adhesion recognition sequence
NIDANS

SEQ ID NO: 1582 - protein, 7 aa, Artificial Sequence
  Representative cyclic modulating agent based on cadherin-7 cell adhesion recognition sequence
NIDANSG

SEQ ID NO: 1583 - protein, 6 aa, Artificial Sequence
  Representative cyclic modulating agent based on cadherin-7 cell adhesion recognition sequence
FNIDAN

SEQ ID NO: 1584 - protein, 7 aa, Artificial Sequence
  Representative cyclic modulating agent based on cadherin-7 cell adhesion recognition sequence
FNIDANS

SEQ ID NO: 1585 - protein, 8 aa, Artificial Sequence
  Representative cyclic modulating agent based on cadherin-7 cell adhesion recognition sequence
FNIDANSG

SEQ ID NO: 1586 - protein, 7 aa, Artificial Sequence
  Representative cyclic modulating agent based on cadherin-7 cell adhesion recognition sequence
YFNIDAN

SEQ ID NO: 1587 - protein, 8 aa, Artificial Sequence
  Representative cyclic modulating agent based on cadherin-7 cell adhesion recognition sequence
YFNIDANS

SEQ ID NO: 1588 - protein, 9 aa, Artificial Sequence
  Representative cyclic modulating agent based on cadherin-7 cell adhesion recognition sequence
YFNIDANSG

SEQ ID NO: 1589 - protein, 5 aa, Artificial Sequence
  Representative cyclic modulating agent based on cadherin-8 cell adhesion recognition sequence
CNDVC

SEQ ID NO: 1590 - protein, 6 aa, Artificial Sequence
  Representative cyclic modulating agent based on cadherin-8 cell adhesion recognition sequence
CINDVC

SEQ ID NO: 1591 - protein, 6 aa, Artificial Sequence
  Representative cyclic modulating agent based on cadherin-8 cell adhesion recognition sequence
CNDVTC

SEQ ID NO: 1592 - protein, 7 aa, Artificial Sequence
  Representative cyclic modulating agent based on cadherin-8 cell adhesion recognition sequence
CQINDVC

SEQ ID NO: 1593 - protein, 7 aa, Artificial Sequence
  Representative cyclic modulating agent based on cadherin-8 cell adhesion recognition sequence
CINDVTC

SEQ ID NO: 1594 - protein, 8 aa, Artificial Sequence
  Representative cyclic modulating agent based on cadherin-8 cell adhesion recognition sequence
CQINDVTC

SEQ ID NO: 1595 - protein, 7 aa, Artificial Sequence
  Representative cyclic modulating agent based on cadherin-8 cell adhesion recognition sequence
CNDVTGC

SEQ ID NO: 1596 - protein, 8 aa, Artificial Sequence
  Representative cyclic modulating agent based on cadherin-8 cell adhesion recognition sequence
CINDVTGC

SEQ ID NO: 1597 - protein, 9 aa, Artificial Sequence
  Representative cyclic modulating agent based on cadherin-8 cell adhesion recognition sequence
CQINDVTGC

SEQ ID NO: 1598 - protein, 8 aa, Artificial Sequence
  Representative cyclic modulating agent based on cadherin-8 cell adhesion recognition sequence
CFQINDVC

SEQ ID NO: 1599 - protein, 9 aa, Artificial Sequence
  Representative cyclic modulating agent based on cadherin-8 cell adhesion recognition sequence
CFQINDVTC

SEQ ID NO: 1600 - protein, 10 aa, Artificial Sequence
  Representative cyclic modulating agent based on cadherin-8 cell adhesion recognition sequence
CFQINDVTGC

SEQ ID NO: 1601 - protein, 9 aa, Artificial Sequence
  Representative cyclic modulating agent based on cadherin-8 cell adhesion recognition sequence
CIFQINDVC

SEQ ID NO: 1602 - protein, 10 aa, Artificial Sequence
  Representative cyclic modulating agent based on cadherin-8 cell adhesion recognition sequence
CIFQINDVTC

SEQ ID NO: 1603 - protein, 11 aa, Artificial Sequence
  Representative cyclic modulating agent based on cadherin-8 cell adhesion recognition sequence
CIFQINDVTGC

SEQ ID NO: 1604 - protein, 5 aa, Artificial Sequence
  Representative cyclic modulating agent based on cadherin-8 cell adhesion recognition sequence
DNDVK

SEQ ID NO: 1605 - protein, 6 aa, Artificial Sequence
  Representative cyclic modulating agent based on cadherin-8 cell adhesion recognition sequence
DINDVK

SEQ ID NO: 1606 - protein, 7 aa, Artificial Sequence
  Representative cyclic modulating agent based on cadherin-8 cell adhesion recognition sequence
DQINDVK

SEQ ID NO: 1607 - protein, 8 aa, Artificial Sequence
  Representative cyclic modulating agent based on cadherin-8 cell adhesion recognition sequence
DFQINDVK

SEQ ID NO: 1608 - protein, 9 aa, Artificial Sequence
  Representative cyclic modulating agent based on cadherin-8 cell adhesion recognition sequence
DIFQINDVK

SEQ ID NO: 1609 - protein, 5 aa, Artificial Sequence
  Representative cyclic modulating agent based on cadherin-8 cell adhesion recognition sequence
ENDVK

SEQ ID NO: 1610 - protein, 6 aa, Artificial Sequence
  Representative cyclic modulating agent based on cadherin-8 cell adhesion recognition sequence
EINDVK

SEQ ID NO: 1611 - protein, 7 aa, Artificial Sequence
  Representative cyclic modulating agent based on cadherin-8 cell adhesion recognition sequence
EQINDVK

SEQ ID NO: 1612 - protein, 8 aa, Artificial Sequence
  Representative cyclic modulating agent based on cadherin-8 cell adhesion recognition sequence
EFQINDVK

SEQ ID NO: 1613 - protein, 9 aa, Artificial Sequence
  Representative cyclic modulating agent based on cadherin-8 cell adhesion recognition sequence
EIFQINDVK

SEQ ID NO: 1614 - protein, 5 aa, Artificial Sequence
  Representative cyclic modulating agent based on cadherin-8 cell adhesion recognition sequence
KNDVD

SEQ ID NO: 1615 - protein, 6 aa, Artificial Sequence
  Representative cyclic modulating agent based on cadherin-8 cell adhesion recognition sequence
KINDVD

SEQ ID NO: 1616 - protein, 6 aa, Artificial Sequence
  Representative cyclic modulating agent based on cadherin-8 cell adhesion recognition sequence
KNDVTD

SEQ ID NO: 1617 - protein, 7 aa, Artificial Sequence
  Representative cyclic modulating agent based on cadherin-8 cell adhesion recognition sequence
KQINDVD

SEQ ID NO: 1618 - protein, 7 aa, Artificial Sequence
  Representative cyclic modulating agent based on cadherin-8 cell adhesion recognition sequence
KINDVTD

SEQ ID NO: 1619 - protein, 8 aa, Artificial Sequence
  Representative cyclic modulating agent based on cadherin-8 cell adhesion recognition sequence
KQINDVTD

SEQ ID NO: 1620 - protein, 7 aa, Artificial Sequence
  Representative cyclic modulating agent based on cadherin-8 cell adhesion recognition sequence
KNDVTGD

SEQ ID NO: 1621 - protein, 8 aa, Artificial Sequence
  Representative cyclic modulating agent based on cadherin-8 cell adhesion recognition sequence
KINDVTGD

SEQ ID NO: 1622 - protein, 9 aa, Artificial Sequence
  Representative cyclic modulating agent based on cadherin-8 cell adhesion recognition sequence
KQINDVTGD

SEQ ID NO: 1623 - protein, 8 aa, Artificial Sequence
  Representative cyclic modulating agent based on cadherin-8 cell adhesion recognition sequence
KFQINDVD

SEQ ID NO: 1624 - protein, 9 aa, Artificial Sequence
  Representative cyclic modulating agent based on cadherin-8 cell adhesion recognition sequence
KFQINDVTD

SEQ ID NO: 1625 - protein, 10 aa, Artificial Sequence
  Representative cyclic modulating agent based on cadherin-8 cell adhesion recognition sequence
KFQINDVTGD

SEQ ID NO: 1626 - protein, 9 aa, Artificial Sequence
  Representative cyclic modulating agent based on cadherin-8 cell adhesion recognition sequence
KIFQINDVD

SEQ ID NO: 1627 - protein, 10 aa, Artificial Sequence
  Representative cyclic modulating agent based on cadherin-8 cell adhesion recognition sequence
KIFQINDVTD

SEQ ID NO: 1628 - protein, 11 aa, Artificial Sequence
  Representative cyclic modulating agent based on cadherin-8 cell adhesion recognition sequence
KIFQINDVTGD

SEQ ID NO: 1629 - protein, 5 aa, Artificial Sequence
  Representative cyclic modulating agent based on cadherin-8 cell adhesion recognition sequence
VNDVT

SEQ ID NO: 1630 - protein, 5 aa, Artificial Sequence
  Representative cyclic modulating agent based on cadherin-8 cell adhesion recognition sequence
INDVT

SEQ ID NO: 1631 - protein, 6 aa, Artificial Sequence
  Representative cyclic modulating agent based on cadherin-8 cell adhesion recognition sequence
QINDVT

SEQ ID NO: 1632 - protein, 5 aa, Artificial Sequence
  Representative cyclic modulating agent based on cadherin-8 cell adhesion recognition sequence
NDVTG

SEQ ID NO: 1633 - protein, 5 aa, Artificial Sequence
  Representative cyclic modulating agent based on cadherin-8 cell adhesion recognition sequence
INVTG

SEQ ID NO: 1634 - protein, 5 aa, Artificial Sequence
  Representative cyclic modulating agent based on cadherin-8 cell adhesion recognition sequence
KNDVE

SEQ ID NO: 1635 - protein, 6 aa, Artificial Sequence
  Representative cyclic modulating agent based on cadherin-8 cell adhesion recognition sequence
KINDVE

SEQ ID NO: 1636 - protein, 6 aa, Artificial Sequence
  Representative cyclic modulating agent based on cadherin-8 cell adhesion recognition sequence
KNDVTE

SEQ ID NO: 1637 - protein, 7 aa, Artificial Sequence
  Representative cyclic modulating agent based on cadherin-8 cell adhesion recognition sequence
KQINDVE

SEQ ID NO: 1638 - protein, 7 aa, Artificial Sequence
  Representative cyclic modulating agent based on cadherin-8 cell adhesion recognition sequence
KINDVTE

SEQ ID NO: 1639 - protein, 8 aa, Artificial Sequence
  Representative cyclic modulating agent based on cadherin-8 cell adhesion recognition sequence
KQINDVTE

SEQ ID NO: 1640 - protein, 7 aa, Artificial Sequence
  Representative cyclic modulating agent based on cadherin-8 cell adhesion recognition sequence
KNDVTGE

SEQ ID NO: 1641 - protein, 8 aa, Artificial Sequence
  Representative cyclic modulating agent based on cadherin-8 cell adhesion recognition sequence
KINDVTGE

SEQ ID NO: 1642 - protein, 9 aa, Artificial Sequence
  Representative cyclic modulating agent based on cadherin-8 cell adhesion recognition sequence
KQINDVTGE

SEQ ID NO: 1643 - protein, 8 aa, Artificial Sequence
  Representative cyclic modulating agent based on cadherin-8 cell adhesion recognition sequence
KFQINDVE

SEQ ID NO: 1644 - protein, 9 aa, Artificial Sequence
  Representative cyclic modulating agent based on cadherin-8 cell adhesion recognition sequence
KFQINDVTE

SEQ ID NO: 1645 - protein, 10 aa, Artificial Sequence
  Representative cyclic modulating agent based on cadherin-8 cell adhesion recognition sequence
KFQINDVTGE

SEQ ID NO: 1646 - protein, 9 aa, Artificial Sequence
  Representative cyclic modulating agent based on cadherin-8 cell adhesion recognition sequence
KIFQINDVE

SEQ ID NO: 1647 - protein, 10 aa, Artificial Sequence
  Representative cyclic modulating agent based on cadherin-8 cell adhesion recognition sequence
KIFQINDVTE

SEQ ID NO: 1648 - protein, 11 aa, Artificial Sequence
  Representative cyclic modulating agent based on cadherin-8 cell adhesion recognition sequence
KIFQINDVTGE

SEQ ID NO: 1649 - protein, 5 aa, Artificial Sequence
  Representative cyclic modulating agent based on cadherin-8 cell adhesion recognition sequence
CEEFC

SEQ ID NO: 1650 - protein, 6 aa, Artificial Sequence
  Representative cyclic modulating agent based on cadherin-8 cell adhesion recognition sequence
CEEFSC

SEQ ID NO: 1651 - protein, 7 aa, Artificial Sequence
  Representative cyclic modulating agent based on cadherin-8 cell adhesion recognition sequence
CEEFSGC

SEQ ID NO: 1652 - protein, 6 aa, Artificial Sequence
  Representative cyclic modulating agent based on cadherin-8 cell adhesion recognition sequence
CLEEFC

SEQ ID NO: 1653 - protein, 7 aa, Artificial Sequence
  Representative cyclic modulating agent based on cadherin-8 cell adhesion recognition sequence
CLEEFSC

SEQ ID NO: 1654 - protein, 8 aa, Artificial Sequence
  Representative cyclic modulating agent based on cadherin-8 cell adhesion recognition sequence
CLEEFSGC

SEQ ID NO: 1655 - protein, 7 aa, Artificial Sequence
  Representative cyclic modulating agent based on cadherin-8 cell adhesion recognition sequence
CVLEEFC

SEQ ID NO: 1656 - protein, 8 aa, Artificial Sequence
  Representative cyclic modulating agent based on cadherin-8 cell adhesion recognition sequence
CVLEEFSC

SEQ ID NO: 1657 - protein, 9 aa, Artificial Sequence
  Representative cyclic modulating agent based on cadherin-8 cell adhesion recognition sequence
CVLEEFSGC

SEQ ID NO: 1658 - protein, 8 aa, Artificial Sequence
  Representative cyclic modulating agent based on cadherin-8 cell adhesion recognition sequence
CFVLEEFC

SEQ ID NO: 1659 - protein, 9 aa, Artificial Sequence
  Representative cyclic modulating agent based on cadherin-8 cell adhesion recognition sequence
CFVLEEFSC

SEQ ID NO: 1660 - protein, 10 aa, Artificial Sequence
  Representative cyclic modulating agent based on cadherin-8 cell adhesion recognition sequence
CFVLEEFSGC

SEQ ID NO: 1661 - protein, 9 aa, Artificial Sequence
  Representative cyclic modulating agent based on cadherin-8 cell adhesion recognition sequence
CMFVLEEFC

SEQ ID NO: 1662 - protein, 10 aa, Artificial Sequence
  Representative cyclic modulating agent based on cadherin-8 cell adhesion recognition sequence
CMFVLEEFSC

SEQ ID NO: 1663 - protein, 11 aa, Artificial Sequence
  Representative cyclic modulating agent based on cadherin-8 cell adhesion recognition sequence
CMFVLEEFSGC

SEQ ID NO: 1664 - protein, 5 aa, Artificial Sequence
  Representative cyclic modulating agent based on cadherin-8 cell adhesion recognition sequence
EEEFK

SEQ ID NO: 1665 - protein, 6 aa, Artificial Sequence
  Representative cyclic modulating agent based on cadherin-8 cell adhesion recognition sequence
EEEFSK

SEQ ID NO: 1666 - protein, 7 aa, Artificial Sequence
  Representative cyclic modulating agent based on cadherin-8 cell adhesion recognition sequence
EEEFSGK

SEQ ID NO: 1667 - protein, 6 aa, Artificial Sequence
  Representative cyclic modulating agent based on cadherin-8 cell adhesion recognition sequence
ELEEFK

SEQ ID NO: 1668 - protein, 7 aa, Artificial Sequence
  Representative cyclic modulating agent based on cadherin-8 cell adhesion recognition sequence
ELEEFSK

SEQ ID NO: 1669 - protein, 8 aa, Artificial Sequence
  Representative cyclic modulating agent based on cadherin-8 cell adhesion recognition sequence
ELEEFSGK

SEQ ID NO: 1670 - protein, 7 aa, Artificial Sequence
  Representative cyclic modulating agent based on cadherin-8 cell adhesion recognition sequence
EVLEEFK

SEQ ID NO: 1671 - protein, 8 aa, Artificial Sequence
  Representative cyclic modulating agent based on cadherin-8 cell adhesion recognition sequence
EVLEEFSK

SEQ ID NO: 1672 - protein, 9 aa, Artificial Sequence
  Representative cyclic modulating agent based on cadherin-8 cell adhesion recognition sequence
EVLEEFSGK

SEQ ID NO: 1673 - protein, 8 aa, Artificial Sequence
  Representative cyclic modulating agent based on cadherin-8 cell adhesion recognition sequence
EFVLEEFK

SEQ ID NO: 1674 - protein, 9 aa, Artificial Sequence
  Representative cyclic modulating agent based on cadherin-8 cell adhesion recognition sequence
EFVLEEFSK

SEQ ID NO: 1675 - protein, 10 aa, Artificial Sequence
  Representative cyclic modulating agent based on cadherin-8 cell adhesion recognition sequence
EFVLEEFSGK

SEQ ID NO: 1676 - protein, 9 aa, Artificial Sequence
  Representative cyclic modulating agent based on cadherin-8 cell adhesion recognition sequence
EMFVLEEFK

SEQ ID NO: 1677 - protein, 10 aa, Artificial Sequence
  Representative cyclic modulating agent based on cadherin-8 cell adhesion recognition sequence
EMFVLEEFSK

SEQ ID NO: 1678 - protein, 11 aa, Artificial Sequence
  Representative cyclic modulating agent based on cadherin-8 cell adhesion recognition sequence
EMFVLEEFSGK

SEQ ID NO: 1679 - protein, 5 aa, Artificial Sequence
  Representative cyclic modulating agent based on cadherin-8 cell adhesion recognition sequence
KEEFD

SEQ ID NO: 1680 - protein, 6 aa, Artificial Sequence
  Representative cyclic modulating agent based on cadherin-8 cell adhesion recognition sequence
KEEFSD

SEQ ID NO: 1681 - protein, 7 aa, Artificial Sequence
  Representative cyclic modulating agent based on cadherin-8 cell adhesion recognition sequence
KEEFSGD

SEQ ID NO: 1682 - protein, 6 aa, Artificial Sequence
  Representative cyclic modulating agent based on cadherin-8 cell adhesion recognition sequence
KLEEFD

SEQ ID NO: 1683 - protein, 7 aa, Artificial Sequence
  Representative cyclic modulating agent based on cadherin-8 cell adhesion recognition sequence
KLEEFSD

SEQ ID NO: 1684 - protein, 8 aa, Artificial Sequence
  Representative cyclic modulating agent based on cadherin-8 cell adhesion recognition sequence
KLEEFSGD

SEQ ID NO: 1685 - protein, 7 aa, Artificial Sequence
  Representative cyclic modulating agent based on cadherin-8 cell adhesion recognition sequence
KVLEEFD

SEQ ID NO: 1686 - protein, 8 aa, Artificial Sequence
  Representative cyclic modulating agent based on cadherin-8 cell adhesion recognition sequence
KVLEEFSD

SEQ ID NO: 1687 - protein, 9 aa, Artificial Sequence
  Representative cyclic modulating agent based on cadherin-8 cell adhesion recognition sequence
KVLEEFSGD

SEQ ID NO: 1688 - protein, 8 aa, Artificial Sequence
  Representative cyclic modulating agent based on cadherin-8 cell adhesion recognition sequence
KFVLEEFD

SEQ ID NO: 1689 - protein, 9 aa, Artificial Sequence
  Representative cyclic modulating agent based on cadherin-8 cell adhesion recognition sequence
KFVLEEFSD

SEQ ID NO: 1690 - protein, 10 aa, Artificial Sequence
  Representative cyclic modulating agent based on cadherin-8 cell adhesion recognition sequence
KFVLEEFSGD

SEQ ID NO: 1691 - protein, 9 aa, Artificial Sequence
  Representative cyclic modulating agent based on cadherin-8 cell adhesion recognition sequence
KMFVLEEFD

SEQ ID NO: 1692 - protein, 10 aa, Artificial Sequence
  Representative cyclic modulating agent based on cadherin-8 cell adhesion recognition sequence
KMFVLEEFSD

SEQ ID NO: 1693 - protein, 11 aa, Artificial Sequence
  Representative cyclic modulating agent based on cadherin-8 cell adhesion recognition sequence
KMFVLEEFSGD

SEQ ID NO: 1694 - protein, 5 aa, Artificial Sequence
  Representative cyclic modulating agent based on cadherin-8 cell adhesion recognition sequence
DEEFK

SEQ ID NO: 1695 - protein, 6 aa, Artificial Sequence
  Representative cyclic modulating agent based on cadherin-8 cell adhesion recognition sequence
DEEFSK

SEQ ID NO: 1696 - protein, 7 aa, Artificial Sequence
  Representative cyclic modulating agent based on cadherin-8 cell adhesion recognition sequence
DEEFSGK

SEQ ID NO: 1697 - protein, 6 aa, Artificial Sequence
  Representative cyclic modulating agent based on cadherin-8 cell adhesion recognition sequence
DLEEFK

SEQ ID NO: 1698 - protein, 7 aa, Artificial Sequence
  Representative cyclic modulating agent based on cadherin-8 cell adhesion recognition sequence
DLEEFSK

SEQ ID NO: 1699 - protein, 8 aa, Artificial Sequence
  Representative cyclic modulating agent based on cadherin-8 cell adhesion recognition sequence
DLEEFSGK

SEQ ID NO: 1700 - protein, 7 aa, Artificial Sequence
  Representative cyclic modulating agent based on cadherin-8 cell adhesion recognition sequence
DVLEEFK

SEQ ID NO: 1701 - protein, 8 aa, Artificial Sequence
  Representative cyclic modulating agent based on cadherin-8 cell adhesion recognition sequence
DVLEEFSK

SEQ ID NO: 1702 - protein, 9 aa, Artificial Sequence
  Representative cyclic modulating agent based on cadherin-8 cell adhesion recognition sequence
DVLEEFSGK

SEQ ID NO: 1703 - protein, 8 aa, Artificial Sequence
  Representative cyclic modulating agent based on cadherin-8 cell adhesion recognition sequence
DFVLEEFK

SEQ ID NO: 1704 - protein, 9 aa, Artificial Sequence
  Representative cyclic modulating agent based on cadherin-8 cell adhesion recognition sequence
DFVLEEFSK

SEQ ID NO: 1705 - protein, 10 aa, Artificial Sequence
  Representative cyclic modulating agent based on cadherin-8 cell adhesion recognition sequence
DFVLEEFSGK

SEQ ID NO: 1706 - protein, 9 aa, Artificial Sequence
  Representative cyclic modulating agent based on cadherin-8 cell adhesion recognition sequence
DMFVLEEFK

SEQ ID NO: 1707 - protein, 10 aa, Artificial Sequence
  Representative cyclic modulating agent based on cadherin-8 cell adhesion recognition sequence
DMFVLEEFSK

SEQ ID NO: 1708 - protein, 11 aa, Artificial Sequence
  Representative cyclic modulating agent based on cadherin-8 cell adhesion recognition sequence
DMFVLEEFSGK

SEQ ID NO: 1709 - protein, 5 aa, Artificial Sequence
  Representative cyclic modulating agent based on cadherin-8 cell adhesion recognition sequence
KEEFE

SEQ ID NO: 1710 - protein, 6 aa, Artificial Sequence
  Representative cyclic modulating agent based on cadherin-8 cell adhesion recognition sequence
KEEFSE

SEQ ID NO: 1711 - protein, 7 aa, Artificial Sequence
  Representative cyclic modulating agent based on cadherin-8 cell adhesion recognition sequence
KEEFSGE

SEQ ID NO: 1712 - protein, 6 aa, Artificial Sequence
  Representative cyclic modulating agent based on cadherin-8 cell adhesion recognition sequence
KLEEFE

SEQ ID NO: 1713 - protein, 7 aa, Artificial Sequence
  Representative cyclic modulating agent based on cadherin-8 cell adhesion recognition sequence
KLEEFSE

SEQ ID NO: 1714 - protein, 8 aa, Artificial Sequence
  Representative cyclic modulating agent based on cadherin-8 cell adhesion recognition sequence
KLEEFSGE

SEQ ID NO: 1715 - protein, 7 aa, Artificial Sequence
  Representative cyclic modulating agent based on cadherin-8 cell adhesion recognition sequence
KVLEEFE

SEQ ID NO: 1716 - protein, 8 aa, Artificial Sequence
  Representative cyclic modulating agent based on cadherin-8 cell adhesion recognition sequence
KVLEEFSE

SEQ ID NO: 1717 - protein, 9 aa, Artificial Sequence
  Representative cyclic modulating agent based on cadherin-8 cell adhesion recognition sequence
KVLEEFSGE

SEQ ID NO: 1718 - protein, 8 aa, Artificial Sequence
  Representative cyclic modulating agent based on cadherin-8 cell adhesion recognition sequence
KFVLEEFE

SEQ ID NO: 1719 - protein, 9 aa, Artificial Sequence
  Representative cyclic modulating agent based on cadherin-8 cell adhesion recognition sequence
KFVLEEFSE

SEQ ID NO: 1720 - protein, 10 aa, Artificial Sequence
  Representative cyclic modulating agent based on cadherin-8 cell adhesion recognition sequence
KFVLEEFSGE

SEQ ID NO: 1721 - protein, 9 aa, Artificial Sequence
  Representative cyclic modulating agent based on cadherin-8 cell adhesion recognition sequence
KMFVLEEFE

SEQ ID NO: 1722 - protein, 10 aa, Artificial Sequence
  Representative cyclic modulating agent based on cadherin-8 cell adhesion recognition sequence
KMFVLEEFSE

SEQ ID NO: 1723 - protein, 11 aa, Artificial Sequence
  Representative cyclic modulating agent based on cadherin-8 cell adhesion recognition sequence
KMFVLEEFSGE

SEQ ID NO: 1724 - protein, 5 aa, Artificial Sequence
  Representative cyclic modulating agent based on cadherin-8 cell adhesion recognition sequence
EEFSG

SEQ ID NO: 1725 - protein, 5 aa, Artificial Sequence
  Representative cyclic modulating agent based on cadherin-8 cell adhesion recognition sequence
LEEFS

SEQ ID NO: 1726 - protein, 6 aa, Artificial Sequence
  Representative cyclic modulating agent based on cadherin-8 cell adhesion recognition sequence
LEEFSG

SEQ ID NO: 1727 - protein, 5 aa, Artificial Sequence
  Representative cyclic modulating agent based on cadherin-8 cell adhesion recognition sequence
VLEEF

SEQ ID NO: 1728 - protein, 6 aa, Artificial Sequence
  Representative cyclic modulating agent based on cadherin-8 cell adhesion recognition sequence
VLEEFS

SEQ ID NO: 1729 - protein, 7 aa, Artificial Sequence
  Representative cyclic modulating agent based on cadherin-8 cell adhesion recognition sequence
VLEEFSG

SEQ ID NO: 1730 - protein, 6 aa, Artificial Sequence
  Representative cyclic modulating agent based on cadherin-8 cell adhesion recognition sequence
FVLEEF

SEQ ID NO: 1731 - protein, 7 aa, Artificial Sequence
  Representative cyclic modulating agent based on cadherin-8 cell adhesion recognition sequence
FVLEEFS

SEQ ID NO: 1732 - protein, 8 aa, Artificial Sequence
  Representative cyclic modulating agent based on cadherin-8 cell adhesion recognition sequence
FVLEEFSG

SEQ ID NO: 1733 - protein, 7 aa, Artificial Sequence
  Representative cyclic modulating agent based on cadherin-8 cell adhesion recognition sequence
MFVLEEF

SEQ ID NO: 1734 - protein, 8 aa, Artificial Sequence
  Representative cyclic modulating agent based on cadherin-8 cell adhesion recognition sequence
MFVLEEFS

SEQ ID NO: 1735 - protein, 9 aa, Artificial Sequence
  Representative cyclic modulating agent based on cadherin-8 cell adhesion recognition sequence
MFVLEEFSG

SEQ ID NO: 1736 - protein, 5 aa, Artificial Sequence
  Representative cyclic modulating agent based on cadherin-12 cell adhesion recognition sequence
CDETC

SEQ ID NO: 1737 - protein, 6 aa, Artificial Sequence
  Representative cyclic modulating agent based on cadherin-12 cell adhesion recognition sequence
CIDETC

SEQ ID NO: 1738 - protein, 6 aa, Artificial Sequence
  Representative cyclic modulating agent based on cadherin-12 cell adhesion recognition sequence
CDETTC

SEQ ID NO: 1739 - protein, 7 aa, Artificial Sequence
  Representative cyclic modulating agent based on cadherin-12 cell adhesion recognition sequence
CTIDETC

SEQ ID NO: 1740 - protein, 7 aa, Artificial Sequence
  Representative cyclic modulating agent based on cadherin-12 cell adhesion recognition sequence
CIDETTC

SEQ ID NO: 1741 - protein, 8 aa, Artificial Sequence
  Representative cyclic modulating agent based on cadherin-12 cell adhesion recognition sequence
CTIDETTC

SEQ ID NO: 1742 - protein, 7 aa, Artificial Sequence
  Representative cyclic modulating agent based on cadherin-12 cell adhesion recognition sequence
CDETTGC

SEQ ID NO: 1743 - protein, 8 aa, Artificial Sequence
  Representative cyclic modulating agent based on cadherin-12 cell adhesion recognition sequence
CIDETTGC

SEQ ID NO: 1744 - protein, 9 aa, Artificial Sequence
  Representative cyclic modulating agent based on cadherin-12 cell adhesion recognition sequence
CTIDETTGC

SEQ ID NO: 1745 - protein, 8 aa, Artificial Sequence
  Representative cyclic modulating agent based on cadherin-12 cell adhesion recognition sequence
CFTIDETC

SEQ ID NO: 1746 - protein, 9 aa, Artificial Sequence
  Representative cyclic modulating agent based on cadherin-12 cell adhesion recognition sequence
CFTIDETTC

SEQ ID NO: 1747 - protein, 10 aa, Artificial Sequence
  Representative cyclic modulating agent based on cadherin-12 cell adhesion recognition sequence
CFTIDETTGC

SEQ ID NO: 1748 - protein, 9 aa, Artificial Sequence
  Representative cyclic modulating agent based on cadherin-12 cell adhesion recognition sequence
CVFTIDETC

SEQ ID NO: 1749 - protein, 10 aa, Artificial Sequence
  Representative cyclic modulating agent based on cadherin-12 cell adhesion recognition sequence
CVFTIDETTC

SEQ ID NO: 1750 - protein, 11 aa, Artificial Sequence
  Representative cyclic modulating agent based on cadherin-12 cell adhesion recognition sequence
CVFTIDETTGC

SEQ ID NO: 1751 - protein, 6 aa, Artificial Sequence
  Representative cyclic modulating agent based on cadherin-12 cell adhesion recognition sequence
DDETTK

SEQ ID NO: 1752 - protein, 5 aa, Artificial Sequence
  Representative cyclic modulating agent based on cadherin-12 cell adhesion recognition sequence
DDETK

SEQ ID NO: 1753 - protein, 6 aa, Artificial Sequence
  Representative cyclic modulating agent based on cadherin-12 cell adhesion recognition sequence
DIDETK

SEQ ID NO: 1754 - protein, 7 aa, Artificial Sequence
  Representative cyclic modulating agent based on cadherin-12 cell adhesion recognition sequence
DTIDETK

SEQ ID NO: 1755 - protein, 8 aa, Artificial Sequence
  Representative cyclic modulating agent based on cadherin-12 cell adhesion recognition sequence
DFTIDETK

SEQ ID NO: 1756 - protein, 9 aa, Artificial Sequence
  Representative cyclic modulating agent based on cadherin-12 cell adhesion recognition sequence
DVFTIDETK

SEQ ID NO: 1757 - protein, 5 aa, Artificial Sequence
  Representative cyclic modulating agent based on cadherin-12 cell adhesion recognition sequence
EDETK

SEQ ID NO: 1758 - protein, 6 aa, Artificial Sequence
  Representative cyclic modulating agent based on cadherin-12 cell adhesion recognition sequence
EIDETK

SEQ ID NO: 1759 - protein, 7 aa, Artificial Sequence
  Representative cyclic modulating agent based on cadherin-12 cell adhesion recognition sequence
ETIDETK

SEQ ID NO: 1760 - protein, 8 aa, Artificial Sequence
  Representative cyclic modulating agent based on cadherin-12 cell adhesion recognition sequence
EFTIDETK

SEQ ID NO: 1761 - protein, 9 aa, Artificial Sequence
  Representative cyclic modulating agent based on cadherin-12 cell adhesion recognition sequence
EVFTIDETK

SEQ ID NO: 1762 - protein, 5 aa, Artificial Sequence
  Representative cyclic modulating agent based on cadherin-12 cell adhesion recognition sequence
KDETD

SEQ ID NO: 1763 - protein, 6 aa, Artificial Sequence
  Representative cyclic modulating agent based on cadherin-12 cell adhesion recognition sequence
KIDETD

SEQ ID NO: 1764 - protein, 6 aa, Artificial Sequence
  Representative cyclic modulating agent based on cadherin-12 cell adhesion recognition sequence
KDETTD

SEQ ID NO: 1765 - protein, 7 aa, Artificial Sequence
  Representative cyclic modulating agent based on cadherin-12 cell adhesion recognition sequence
KTIDETD

SEQ ID NO: 1766 - protein, 7 aa, Artificial Sequence
  Representative cyclic modulating agent based on cadherin-12 cell adhesion recognition sequence
KIDETTD

SEQ ID NO: 1767 - protein, 8 aa, Artificial Sequence
  Representative cyclic modulating agent based on cadherin-12 cell adhesion recognition sequence
KTIDETTD

SEQ ID NO: 1768 - protein, 7 aa, Artificial Sequence
  Representative cyclic modulating agent based on cadherin-12 cell adhesion recognition sequence
KDETTGD

SEQ ID NO: 1769 - protein, 8 aa, Artificial Sequence
  Representative cyclic modulating agent based on cadherin-12 cell adhesion recognition sequence
KIDETTGD

SEQ ID NO: 1770 - protein, 9 aa, Artificial Sequence
  Representative cyclic modulating agent based on cadherin-12 cell adhesion recognition sequence
KTIDETTGD

SEQ ID NO: 1771 - protein, 8 aa, Artificial Sequence
  Representative cyclic modulating agent based on cadherin-12 cell adhesion recognition sequence
KFTIDETD

SEQ ID NO: 1772 - protein, 9 aa, Artificial Sequence
  Representative cyclic modulating agent based on cadherin-12 cell adhesion recognition sequence
KFTIDETTD

SEQ ID NO: 1773 - protein, 10 aa, Artificial Sequence
  Representative cyclic modulating agent based on cadherin-12 cell adhesion recognition sequence
KFTIDETTGD

SEQ ID NO: 1774 - protein, 9 aa, Artificial Sequence
  Representative cyclic modulating agent based on cadherin-12 cell adhesion recognition sequence
KVFTIDETD

SEQ ID NO: 1775 - protein, 10 aa, Artificial Sequence
  Representative cyclic modulating agent based on cadherin-12 cell adhesion recognition sequence
KVFTIDETTD

SEQ ID NO: 1776 - protein, 11 aa, Artificial Sequence
  Representative cyclic modulating agent based on cadherin-12 cell adhesion recognition sequence
KVFTIDETTGD

SEQ ID NO: 1777 - protein, 7 aa, Artificial Sequence
  Representative cyclic modulating agent based on cadherin-12 cell adhesion recognition sequence
DIDETTK

SEQ ID NO: 1778 - protein, 5 aa, Artificial Sequence
  Representative cyclic modulating agent based on cadherin-12 cell adhesion recognition sequence
IDETT

SEQ ID NO: 1779 - protein, 6 aa, Artificial Sequence
  Representative cyclic modulating agent based on cadherin-12 cell adhesion recognition sequence
TIDETT

SEQ ID NO: 1780 - protein, 5 aa, Artificial Sequence
  Representative cyclic modulating agent based on cadherin-12 cell adhesion recognition sequence
DETTG

SEQ ID NO: 1781 - protein, 6 aa, Artificial Sequence
  Representative cyclic modulating agent based on cadherin-12 cell adhesion recognition sequence
IDETTG

SEQ ID NO: 1782 - protein, 5 aa, Artificial Sequence
  Representative cyclic modulating agent based on cadherin-12 cell adhesion recognition sequence
KDETE

SEQ ID NO: 1783 - protein, 6 aa, Artificial Sequence
  Representative cyclic modulating agent based on cadherin-12 cell adhesion recognition sequence
KIDETE

SEQ ID NO: 1784 - protein, 6 aa, Artificial Sequence
  Representative cyclic modulating agent based on cadherin-12 cell adhesion recognition sequence
KDETTE

SEQ ID NO: 1785 - protein, 7 aa, Artificial Sequence
  Representative cyclic modulating agent based on cadherin-12 cell adhesion recognition sequence
KTIDETE

SEQ ID NO: 1786 - protein, 7 aa, Artificial Sequence
  Representative cyclic modulating agent based on cadherin-12 cell adhesion recognition sequence
KIDETTE

SEQ ID NO: 1787 - protein, 8 aa, Artificial Sequence
  Representative cyclic modulating agent based on cadherin-12 cell adhesion recognition sequence
KTIDETTE

SEQ ID NO: 1788 - protein, 7 aa, Artificial Sequence
  Representative cyclic modulating agent based on cadherin-12 cell adhesion recognition sequence
KDETTGE

SEQ ID NO: 1789 - protein, 8 aa, Artificial Sequence
  Representative cyclic modulating agent based on cadherin-12 cell adhesion recognition sequence
KIDETTGE

SEQ ID NO: 1790 - protein, 9 aa, Artificial Sequence
  Representative cyclic modulating agent based on cadherin-12 cell adhesion recognition sequence
KTIDETTGE

SEQ ID NO: 1791 - protein, 8 aa, Artificial Sequence
  Representative cyclic modulating agent based on cadherin-12 cell adhesion recognition sequence
KFTIDETE

SEQ ID NO: 1792 - protein, 9 aa, Artificial Sequence
  Representative cyclic modulating agent based on cadherin-12 cell adhesion recognition sequence
KFTIDETTE

SEQ ID NO: 1793 - protein, 10 aa, Artificial Sequence
  Representative cyclic modulating agent based on cadherin-12 cell adhesion recognition sequence
KFTIDETTGE

SEQ ID NO: 1794 - protein, 9 aa, Artificial Sequence
  Representative cyclic modulating agent based on cadherin-12 cell adhesion recognition sequence
KVFTIDETE

SEQ ID NO: 1795 - protein, 10 aa, Artificial Sequence
  Representative cyclic modulating agent based on cadherin-12 cell adhesion recognition sequence
KIFTIDETTE

SEQ ID NO: 1796 - protein, 11 aa, Artificial Sequence
  Representative cyclic modulating agent based on cadherin-12 cell adhesion recognition sequence
KVFTIDETTGE

SEQ ID NO: 1797 - protein, 5 aa, Artificial Sequence
  Representative cyclic modulating agent based on cadherin-12 cell adhesion recognition sequence
CDPKC

SEQ ID NO: 1798 - protein, 6 aa, Artificial Sequence
  Representative cyclic modulating agent based on cadherin-12 cell adhesion recognition sequence
CDPKTC

SEQ ID NO: 1799 - protein, 7 aa, Artificial Sequence
  Representative cyclic modulating agent based on cadherin-12 cell adhesion recognition sequence
CDPKTGC

SEQ ID NO: 1800 - protein, 6 aa, Artificial Sequence
  Representative cyclic modulating agent based on cadherin-12 cell adhesion recognition sequence
CIDPKC

SEQ ID NO: 1801 - protein, 7 aa, Artificial Sequence
  Representative cyclic modulating agent based on cadherin-12 cell adhesion recognition sequence
CIDPKTC

SEQ ID NO: 1802 - protein, 8 aa, Artificial Sequence
  Representative cyclic modulating agent based on cadherin-12 cell adhesion recognition sequence
CIDPKTGC

SEQ ID NO: 1803 - protein, 7 aa, Artificial Sequence
  Representative cyclic modulating agent based on cadherin-12 cell adhesion recognition sequence
CSIDPKC

SEQ ID NO: 1804 - protein, 8 aa, Artificial Sequence
  Representative cyclic modulating agent based on cadherin-12 cell adhesion recognition sequence
CSIDPKTC

SEQ ID NO: 1805 - protein, 9 aa, Artificial Sequence
  Representative cyclic modulating agent based on cadherin-12 cell adhesion recognition sequence
CSIDPKTGC

SEQ ID NO: 1806 - protein, 8 aa, Artificial Sequence
  Representative cyclic modulating agent based on cadherin-12 cell adhesion recognition sequence
CFSIDPKC

SEQ ID NO: 1807 - protein, 9 aa, Artificial Sequence
  Representative cyclic modulating agent based on cadherin-12 cell adhesion recognition sequence
CFSIDPKTC

SEQ ID NO: 1808 - protein, 10 aa, Artificial Sequence
  Representative cyclic modulating agent based on cadherin-12 cell adhesion recognition sequence
CFSIDPKTGC

SEQ ID NO: 1809 - protein, 9 aa, Artificial Sequence
  Representative cyclic modulating agent based on cadherin-12 cell adhesion recognition sequence
CYFSIDPKC

SEQ ID NO: 1810 - protein, 10 aa, Artificial Sequence
  Representative cyclic modulating agent based on cadherin-12 cell adhesion recognition sequence
CYFSIDPKTC

SEQ ID NO: 1811 - protein, 11 aa, Artificial Sequence
  Representative cyclic modulating agent based on cadherin-12 cell adhesion recognition sequence
CYFSIDPKTGC

SEQ ID NO: 1812 - protein, 5 aa, Artificial Sequence
  Representative cyclic modulating agent based on cadherin-12 cell adhesion recognition sequence
EDPKK

SEQ ID NO: 1813 - protein, 6 aa, Artificial Sequence
  Representative cyclic modulating agent based on cadherin-12 cell adhesion recognition sequence
EDPKTK

SEQ ID NO: 1814 - protein, 7 aa, Artificial Sequence
  Representative cyclic modulating agent based on cadherin-12 cell adhesion recognition sequence
EDPKTGK

SEQ ID NO: 1815 - protein, 6 aa, Artificial Sequence
  Representative cyclic modulating agent based on cadherin-12 cell adhesion recognition sequence
EIDPKK

SEQ ID NO: 1816 - protein, 7 aa, Artificial Sequence
  Representative cyclic modulating agent based on cadherin-12 cell adhesion recognition sequence
EIDPKTK

SEQ ID NO: 1817 - protein, 8 aa, Artificial Sequence
  Representative cyclic modulating agent based on cadherin-12 cell adhesion recognition sequence
EIDPKTGK

SEQ ID NO: 1818 - protein, 7 aa, Artificial Sequence
  Representative cyclic modulating agent based on cadherin-12 cell adhesion recognition sequence
ESIDPKK

SEQ ID NO: 1819 - protein, 8 aa, Artificial Sequence
  Representative cyclic modulating agent based on cadherin-12 cell adhesion recognition sequence
ESIDPKTK

SEQ ID NO: 1820 - protein, 9 aa, Artificial Sequence
  Representative cyclic modulating agent based on cadherin-12 cell adhesion recognition sequence
ESIDPKTGK

SEQ ID NO: 1821 - protein, 8 aa, Artificial Sequence
  Representative cyclic modulating agent based on cadherin-12 cell adhesion recognition sequence
EFSIDPKK

SEQ ID NO: 1822 - protein, 9 aa, Artificial Sequence
  Representative cyclic modulating agent based on cadherin-12 cell adhesion recognition sequence
EFSIDPKTK

SEQ ID NO: 1823 - protein, 10 aa, Artificial Sequence
  Representative cyclic modulating agent based on cadherin-12 cell adhesion recognition sequence
EFSIDPKTGK

SEQ ID NO: 1824 - protein, 9 aa, Artificial Sequence
  Representative cyclic modulating agent based on cadherin-12 cell adhesion recognition sequence
EYFSIDPKK

SEQ ID NO: 1825 - protein, 10 aa, Artificial Sequence
  Representative cyclic modulating agent based on cadherin-12 cell adhesion recognition sequence
EYFSIDPKTK

SEQ ID NO: 1826 - protein, 11 aa, Artificial Sequence
  Representative cyclic modulating agent based on cadherin-12 cell adhesion recognition sequence
EYFSIDPKTGK

SEQ ID NO: 1827 - protein, 5 aa, Artificial Sequence
  Representative cyclic modulating agent based on cadherin-12 cell adhesion recognition sequence
KDPKD

SEQ ID NO: 1828 - protein, 6 aa, Artificial Sequence
  Representative cyclic modulating agent based on cadherin-12 cell adhesion recognition sequence
KDPKTD

SEQ ID NO: 1829 - protein, 7 aa, Artificial Sequence
  Representative cyclic modulating agent based on cadherin-12 cell adhesion recognition sequence
KDPKTGD

SEQ ID NO: 1830 - protein, 6 aa, Artificial Sequence
  Representative cyclic modulating agent based on cadherin-12 cell adhesion recognition sequence
KIDPKD

SEQ ID NO: 1831 - protein, 7 aa, Artificial Sequence
  Representative cyclic modulating agent based on cadherin-12 cell adhesion recognition sequence
KIDPKTD

SEQ ID NO: 1832 - protein, 8 aa, Artificial Sequence
  Representative cyclic modulating agent based on cadherin-12 cell adhesion recognition sequence
KIDPKTGD

SEQ ID NO: 1833 - protein, 7 aa, Artificial Sequence
  Representative cyclic modulating agent based on cadherin-12 cell adhesion recognition sequence
KSIDPKD

SEQ ID NO: 1834 - protein, 8 aa, Artificial Sequence
  Representative cyclic modulating agent based on cadherin-12 cell adhesion recognition sequence
KSIDPKTD

SEQ ID NO: 1835 - protein, 9 aa, Artificial Sequence
  Representative cyclic modulating agent based on cadherin-12 cell adhesion recognition sequence
KSIDPKTGD

SEQ ID NO: 1836 - protein, 8 aa, Artificial Sequence
  Representative cyclic modulating agent based on cadherin-12 cell adhesion recognition sequence
KFSIDPKD

SEQ ID NO: 1837 - protein, 9 aa, Artificial Sequence
  Representative cyclic modulating agent based on cadherin-12 cell adhesion recognition sequence
KFSIDPKTD

SEQ ID NO: 1838 - protein, 10 aa, Artificial Sequence
  Representative cyclic modulating agent based on cadherin-12 cell adhesion recognition sequence
KFSIDPKTGD

SEQ ID NO: 1839 - protein, 9 aa, Artificial Sequence
  Representative cyclic modulating agent based on cadherin-12 cell adhesion recognition sequence
KYFSIDPKD

SEQ ID NO: 1840 - protein, 10 aa, Artificial Sequence
  Representative cyclic modulating agent based on cadherin-12 cell adhesion recognition sequence
KYFSIDPKTD

SEQ ID NO: 1841 - protein, 11 aa, Artificial Sequence
  Representative cyclic modulating agent based on cadherin-12 cell adhesion recognition sequence
KYFSIDPKTGD

SEQ ID NO: 1842 - protein, 5 aa, Artificial Sequence
  Representative cyclic modulating agent based on cadherin-12 cell adhesion recognition sequence
DDPKK

SEQ ID NO: 1843 - protein, 6 aa, Artificial Sequence
  Representative cyclic modulating agent based on cadherin-12 cell adhesion recognition sequence
DDPKTK

SEQ ID NO: 1844 - protein, 7 aa, Artificial Sequence
  Representative cyclic modulating agent based on cadherin-12 cell adhesion recognition sequence
DDPKTGK

SEQ ID NO: 1845 - protein, 6 aa, Artificial Sequence
  Representative cyclic modulating agent based on cadherin-12 cell adhesion recognition sequence
DIDPKK

SEQ ID NO: 1846 - protein, 7 aa, Artificial Sequence
  Representative cyclic modulating agent based on cadherin-12 cell adhesion recognition sequence
DIDPKTK

SEQ ID NO: 1847 - protein, 8 aa, Artificial Sequence
  Representative cyclic modulating agent based on cadherin-12 cell adhesion recognition sequence
DIDPKTGK

SEQ ID NO: 1848 - protein, 7 aa, Artificial Sequence
  Representative cyclic modulating agent based on cadherin-12 cell adhesion recognition sequence
DSIDPKK

SEQ ID NO: 1849 - protein, 8 aa, Artificial Sequence
  Representative cyclic modulating agent based on cadherin-12 cell adhesion recognition sequence
DSIDPKTK

SEQ ID NO: 1850 - protein, 9 aa, Artificial Sequence
  Representative cyclic modulating agent based on cadherin-12 cell adhesion recognition sequence
DSIDPKTGK

SEQ ID NO: 1851 - protein, 8 aa, Artificial Sequence
  Representative cyclic modulating agent based on cadherin-12 cell adhesion recognition sequence
DFSIDPKK

SEQ ID NO: 1852 - protein, 9 aa, Artificial Sequence
  Representative cyclic modulating agent based on cadherin-12 cell adhesion recognition sequence
DFSIDPKTK

SEQ ID NO: 1853 - protein, 10 aa, Artificial Sequence
  Representative cyclic modulating agent based on cadherin-12 cell adhesion recognition sequence
DFSIDPKTGK

SEQ ID NO: 1854 - protein, 9 aa, Artificial Sequence
  Representative cyclic modulating agent based on cadherin-12 cell adhesion recognition sequence
DYFSIDPKK

SEQ ID NO: 1855 - protein, 10 aa, Artificial Sequence
  Representative cyclic modulating agent based on cadherin-12 cell adhesion recognition sequence
DYFSIDPKTK

SEQ ID NO: 1856 - protein, 11 aa, Artificial Sequence
  Representative cyclic modulating agent based on cadherin-12 cell adhesion recognition sequence
DYFSIDPKTGK

SEQ ID NO: 1857 - protein, 5 aa, Artificial Sequence
  Representative cyclic modulating agent based on cadherin-12 cell adhesion recognition sequence
KDPKE

SEQ ID NO: 1858 - protein, 6 aa, Artificial Sequence
  Representative cyclic modulating agent based on cadherin-12 cell adhesion recognition sequence
KDPKTE

SEQ ID NO: 1859 - protein, 7 aa, Artificial Sequence
  Representative cyclic modulating agent based on cadherin-12 cell adhesion recognition sequence
KDPKTGE

SEQ ID NO: 1860 - protein, 6 aa, Artificial Sequence
  Representative cyclic modulating agent based on cadherin-12 cell adhesion recognition sequence
KIDPKE

SEQ ID NO: 1861 - protein, 7 aa, Artificial Sequence
  Representative cyclic modulating agent based on cadherin-12 cell adhesion recognition sequence
KIDPKTE

SEQ ID NO: 1862 - protein, 8 aa, Artificial Sequence
  Representative cyclic modulating agent based on cadherin-12 cell adhesion recognition sequence
KIDPKTGE

SEQ ID NO: 1863 - protein, 7 aa, Artificial Sequence
  Representative cyclic modulating agent based on cadherin-12 cell adhesion recognition sequence
KSIDPKE

SEQ ID NO: 1864 - protein, 8 aa, Artificial Sequence
  Representative cyclic modulating agent based on cadherin-12 cell adhesion recognition sequence
KSIDPKTE

SEQ ID NO: 1865 - protein, 9 aa, Artificial Sequence
  Representative cyclic modulating agent based on cadherin-12 cell adhesion recognition sequence
KSIDPKTGE

SEQ ID NO: 1866 - protein, 8 aa, Artificial Sequence
  Representative cyclic modulating agent based on cadherin-12 cell adhesion recognition sequence
KFSIDPKE

SEQ ID NO: 1867 - protein, 9 aa, Artificial Sequence
  Representative cyclic modulating agent based on cadherin-12 cell adhesion recognition sequence
KFSIDPKTE

SEQ ID NO: 1868 - protein, 10 aa, Artificial Sequence
  Representative cyclic modulating agent based on cadherin-12 cell adhesion recognition sequence
KFSIDPKTGE

SEQ ID NO: 1869 - protein, 9 aa, Artificial Sequence
  Representative cyclic modulating agent based on cadherin-12 cell adhesion recognition sequence
KYFSIDPKE

SEQ ID NO: 1870 - protein, 10 aa, Artificial Sequence
  Representative cyclic modulating agent based on cadherin-12 cell adhesion recognition sequence
KYFSIDPKTE

SEQ ID NO: 1871 - protein, 11 aa, Artificial Sequence
  Representative cyclic modulating agent based on cadherin-12 cell adhesion recognition sequence
KYFSIDPKTGE

SEQ ID NO: 1872 - protein, 5 aa, Artificial Sequence
  Representative cyclic modulating agent based on cadherin-12 cell adhesion recognition sequence
DPKTG

SEQ ID NO: 1873 - protein, 5 aa, Artificial Sequence
  Representative cyclic modulating agent based on cadherin-12 cell adhesion recognition sequence
IDPKT

SEQ ID NO: 1874 - protein, 6 aa, Artificial Sequence
  Representative cyclic modulating agent based on cadherin-12 cell adhesion recognition sequence
IDPKTG

SEQ ID NO: 1875 - protein, 5 aa, Artificial Sequence
  Representative cyclic modulating agent based on cadherin-12 cell adhesion recognition sequence
SIDPK

SEQ ID NO: 1876 - protein, 6 aa, Artificial Sequence
  Representative cyclic modulating agent based on cadherin-12 cell adhesion recognition sequence
SIDPKT

SEQ ID NO: 1877 - protein, 7 aa, Artificial Sequence
  Representative cyclic modulating agent based on cadherin-12 cell adhesion recognition sequence
SIDPKTG

SEQ ID NO: 1878 - protein, 6 aa, Artificial Sequence
  Representative cyclic modulating agent based on cadherin-12 cell adhesion recognition sequence
FSIDPK

SEQ ID NO: 1879 - protein, 7 aa, Artificial Sequence
  Representative cyclic modulating agent based on cadherin-12 cell adhesion recognition sequence
FSIDPKT

SEQ ID NO: 1880 - protein, 8 aa, Artificial Sequence
  Representative cyclic modulating agent based on cadherin-12 cell adhesion recognition sequence
FSIDPKTG

SEQ ID NO: 1881 - protein, 7 aa, Artificial Sequence
  Representative cyclic modulating agent based on cadherin-12 cell adhesion recognition sequence
YFSIDPK

SEQ ID NO: 1882 - protein, 8 aa, Artificial Sequence
  Representative cyclic modulating agent based on cadherin-12 cell adhesion recognition sequence
YFSIDPKT

SEQ ID NO: 1883 - protein, 9 aa, Artificial Sequence
  Representative cyclic modulating agent based on cadherin-12 cell adhesion recognition sequence
YFSIDPKTG

SEQ ID NO: 1884 - protein, 5 aa, Artificial Sequence
  Representative cyclic modulating agent based on cadherin-14 cell adhesion recognition sequence
CDDTC

SEQ ID NO: 1885 - protein, 6 aa, Artificial Sequence
  Representative cyclic modulating agent based on cadherin-14 cell adhesion recognition sequence
CIDDTC

SEQ ID NO: 1886 - protein, 6 aa, Artificial Sequence
  Representative cyclic modulating agent based on cadherin-14 cell adhesion recognition sequence
CDDTTC

SEQ ID NO: 1887 - protein, 7 aa, Artificial Sequence
  Representative cyclic modulating agent based on cadherin-14 cell adhesion recognition sequence
CIIDDTC

SEQ ID NO: 1888 - protein, 7 aa, Artificial Sequence
  Representative cyclic modulating agent based on cadherin-14 cell adhesion recognition sequence
CIDDTTC

SEQ ID NO: 1889 - protein, 8 aa, Artificial Sequence
  Representative cyclic modulating agent based on cadherin-14 cell adhesion recognition sequence
CIIDDTTC

SEQ ID NO: 1890 - protein, 7 aa, Artificial Sequence
  Representative cyclic modulating agent based on cadherin-14 cell adhesion recognition sequence
CDDTTGC

SEQ ID NO: 1891 - protein, 8 aa, Artificial Sequence
  Representative cyclic modulating agent based on cadherin-14 cell adhesion recognition sequence
CIDDTTGC

SEQ ID NO: 1892 - protein, 9 aa, Artificial Sequence
  Representative cyclic modulating agent based on cadherin-14 cell adhesion recognition sequence
CIIDDTTGC

SEQ ID NO: 1893 - protein, 8 aa, Artificial Sequence
  Representative cyclic modulating agent based on cadherin-14 cell adhesion recognition sequence
CFIIDDTC

SEQ ID NO: 1894 - protein, 9 aa, Artificial Sequence
  Representative cyclic modulating agent based on cadherin-14 cell adhesion recognition sequence
CFIIDDTTC

SEQ ID NO: 1895 - protein, 10 aa, Artificial Sequence
  Representative cyclic modulating agent based on cadherin-14 cell adhesion recognition sequence
CFIIDDTTGC

SEQ ID NO: 1896 - protein, 9 aa, Artificial Sequence
  Representative cyclic modulating agent based on cadherin-14 cell adhesion recognition sequence
CIFIIDDTC

SEQ ID NO: 1897 - protein, 10 aa, Artificial Sequence
  Representative cyclic modulating agent based on cadherin-14 cell adhesion recognition sequence
CIFIIDDTTC

SEQ ID NO: 1898 - protein, 11 aa, Artificial Sequence
  Representative cyclic modulating agent based on cadherin-14 cell adhesion recognition sequence
CIFIIDDTTGC

SEQ ID NO: 1899 - protein, 6 aa, Artificial Sequence
  Representative cyclic modulating agent based on cadherin-14 cell adhesion recognition sequence
EDDTTK

SEQ ID NO: 1900 - protein, 5 aa, Artificial Sequence
  Representative cyclic modulating agent based on cadherin-14 cell adhesion recognition sequence
DDDTK

SEQ ID NO: 1901 - protein, 7 aa, Artificial Sequence
  Representative cyclic modulating agent based on cadherin-14 cell adhesion recognition sequence
DIDDTNK

SEQ ID NO: 1902 - protein, 7 aa, Artificial Sequence
  Representative cyclic modulating agent based on cadherin-14 cell adhesion recognition sequence
DIIDDTK

SEQ ID NO: 1903 - protein, 8 aa, Artificial Sequence
  Representative cyclic modulating agent based on cadherin-14 cell adhesion recognition sequence
DFIIDDTK

SEQ ID NO: 1904 - protein, 9 aa, Artificial Sequence
  Representative cyclic modulating agent based on cadherin-14 cell adhesion recognition sequence
DIFIIDDTK

SEQ ID NO: 1905 - protein, 5 aa, Artificial Sequence
  Representative cyclic modulating agent based on cadherin-14 cell adhesion recognition sequence
EDDTK

SEQ ID NO: 1906 - protein, 6 aa, Artificial Sequence
  Representative cyclic modulating agent based on cadherin-14 cell adhesion recognition sequence
EIDDTK

SEQ ID NO: 1907 - protein, 7 aa, Artificial Sequence
  Representative cyclic modulating agent based on cadherin-14 cell adhesion recognition sequence
EIIDDTK

SEQ ID NO: 1908 - protein, 8 aa, Artificial Sequence
  Representative cyclic modulating agent based on cadherin-14 cell adhesion recognition sequence
EFIIDDTK

SEQ ID NO: 1909 - protein, 9 aa, Artificial Sequence
  Representative cyclic modulating agent based on cadherin-14 cell adhesion recognition sequence
EIFIIDDTK

SEQ ID NO: 1910 - protein, 5 aa, Artificial Sequence
  Representative cyclic modulating agent based on cadherin-14 cell adhesion recognition sequence
KDDTD

SEQ ID NO: 1911 - protein, 6 aa, Artificial Sequence
  Representative cyclic modulating agent based on cadherin-14 cell adhesion recognition sequence
KIDDTD

SEQ ID NO: 1912 - protein, 6 aa, Artificial Sequence
  Representative cyclic modulating agent based on cadherin-14 cell adhesion recognition sequence
KDDTTD

SEQ ID NO: 1913 - protein, 7 aa, Artificial Sequence
  Representative cyclic modulating agent based on cadherin-14 cell adhesion recognition sequence
KIIDDTD

SEQ ID NO: 1914 - protein, 7 aa, Artificial Sequence
  Representative cyclic modulating agent based on cadherin-14 cell adhesion recognition sequence
KIDDTTD

SEQ ID NO: 1915 - protein, 8 aa, Artificial Sequence
  Representative cyclic modulating agent based on cadherin-14 cell adhesion recognition sequence
KIIDDTTD

SEQ ID NO: 1916 - protein, 7 aa, Artificial Sequence
  Representative cyclic modulating agent based on cadherin-14 cell adhesion recognition sequence
KDDTTGD

SEQ ID NO: 1917 - protein, 8 aa, Artificial Sequence
  Representative cyclic modulating agent based on cadherin-14 cell adhesion recognition sequence
KIDDTTGD

SEQ ID NO: 1918 - protein, 9 aa, Artificial Sequence
  Representative cyclic modulating agent based on cadherin-14 cell adhesion recognition sequence
KIIDDTTGD

SEQ ID NO: 1919 - protein, 8 aa, Artificial Sequence
  Representative cyclic modulating agent based on cadherin-14 cell adhesion recognition sequence
KFIIDDTD

SEQ ID NO: 1920 - protein, 9 aa, Artificial Sequence
  Representative cyclic modulating agent based on cadherin-14 cell adhesion recognition sequence
KFIIDDTTD

SEQ ID NO: 1921 - protein, 10 aa, Artificial Sequence
  Representative cyclic modulating agent based on cadherin-14 cell adhesion recognition sequence
KFIIDDTTGD

SEQ ID NO: 1922 - protein, 9 aa, Artificial Sequence
  Representative cyclic modulating agent based on cadherin-14 cell adhesion recognition sequence
KIFIIDDTD

SEQ ID NO: 1923 - protein, 10 aa, Artificial Sequence
  Representative cyclic modulating agent based on cadherin-14 cell adhesion recognition sequence
KIFIIDDTTD

SEQ ID NO: 1924 - protein, 11 aa, Artificial Sequence
  Representative cyclic modulating agent based on cadherin-14 cell adhesion recognition sequence
KIFIIDDTTGD

SEQ ID NO: 1925 - protein, 4 aa, Artificial Sequence
  Representative cyclic modulating agent based on cadherin-14 cell adhesion recognition sequence
DDTT

SEQ ID NO: 1926 - protein, 5 aa, Artificial Sequence
  Representative cyclic modulating agent based on cadherin-14 cell adhesion recognition sequence
IDDTT

SEQ ID NO: 1927 - protein, 6 aa, Artificial Sequence
  Representative cyclic modulating agent based on cadherin-14 cell adhesion recognition sequence
IIDDTT

SEQ ID NO: 1928 - protein, 5 aa, Artificial Sequence
  Representative cyclic modulating agent based on cadherin-14 cell adhesion recognition sequence
DDTTG

SEQ ID NO: 1929 - protein, 6 aa, Artificial Sequence
  Representative cyclic modulating agent based on cadherin-14 cell adhesion recognition sequence
IDDTTG

SEQ ID NO: 1930 - protein, 5 aa, Artificial Sequence
  Representative cyclic modulating agent based on cadherin-14 cell adhesion recognition sequence
KDDTE

SEQ ID NO: 1931 - protein, 6 aa, Artificial Sequence
  Representative cyclic modulating agent based on cadherin-14 cell adhesion recognition sequence
KIDDTE

SEQ ID NO: 1932 - protein, 6 aa, Artificial Sequence
  Representative cyclic modulating agent based on cadherin-14 cell adhesion recognition sequence
KDDTTE

SEQ ID NO: 1933 - protein, 7 aa, Artificial Sequence
  Representative cyclic modulating agent based on cadherin-14 cell adhesion recognition sequence
KIIDDTE

SEQ ID NO: 1934 - protein, 7 aa, Artificial Sequence
  Representative cyclic modulating agent based on cadherin-14 cell adhesion recognition sequence
KIDDTTE

SEQ ID NO: 1935 - protein, 8 aa, Artificial Sequence
  Representative cyclic modulating agent based on cadherin-14 cell adhesion recognition sequence
KIIDDTTE

SEQ ID NO: 1936 - protein, 7 aa, Artificial Sequence
  Representative cyclic modulating agent based on cadherin-14 cell adhesion recognition sequence
KDDTTGE

SEQ ID NO: 1937 - protein, 8 aa, Artificial Sequence
  Representative cyclic modulating agent based on cadherin-14 cell adhesion recognition sequence
KIDDTTGE

SEQ ID NO: 1938 - protein, 9 aa, Artificial Sequence
  Representative cyclic modulating agent based on cadherin-14 cell adhesion recognition sequence
KIIDDTTGE

SEQ ID NO: 1939 - protein, 8 aa, Artificial Sequence
  Representative cyclic modulating agent based on cadherin-14 cell adhesion recognition sequence
KFIIDDTE

SEQ ID NO: 1940 - protein, 9 aa, Artificial Sequence
  Representative cyclic modulating agent based on cadherin-14 cell adhesion recognition sequence
KFIIDDTTE

SEQ ID NO: 1941 - protein, 10 aa, Artificial Sequence
  Representative cyclic modulating agent based on cadherin-14 cell adhesion recognition sequence
KFIIDDTTGE

SEQ ID NO: 1942 - protein, 9 aa, Artificial Sequence
  Representative cyclic modulating agent based on cadherin-14 cell adhesion recognition sequence
KIFIIDDTE

SEQ ID NO: 1943 - protein, 10 aa, Artificial Sequence
  Representative cyclic modulating agent based on cadherin-14 cell adhesion recognition sequence
KIFIIDDTTE

SEQ ID NO: 1944 - protein, 11 aa, Artificial Sequence
  Representative cyclic modulating agent based on cadherin-14 cell adhesion recognition sequence
KIFIIDDTTGE

SEQ ID NO: 1945 - protein, 5 aa, Artificial Sequence
  Representative cyclic modulating agent based on cadherin-14 cell adhesion recognition sequence
CDPKC

SEQ ID NO: 1946 - protein, 6 aa, Artificial Sequence
  Representative cyclic modulating agent based on cadherin-14 cell adhesion recognition sequence
CVDPKC

SEQ ID NO: 1947 - protein, 7 aa, Artificial Sequence
  Representative cyclic modulating agent based on cadherin-14 cell adhesion recognition sequence
CVDPKTC

SEQ ID NO: 1948 - protein, 8 aa, Artificial Sequence
  Representative cyclic modulating agent based on cadherin-14 cell adhesion recognition sequence
CVDPKTGC

SEQ ID NO: 1949 - protein, 7 aa, Artificial Sequence
  Representative cyclic modulating agent based on cadherin-14 cell adhesion recognition sequence
CSVDPKC

SEQ ID NO: 1950 - protein, 8 aa, Artificial Sequence
  Representative cyclic modulating agent based on cadherin-14 cell adhesion recognition sequence
CSVDPKTC

SEQ ID NO: 1951 - protein, 9 aa, Artificial Sequence
  Representative cyclic modulating agent based on cadherin-14 cell adhesion recognition sequence
CSVDPKTGC

SEQ ID NO: 1952 - protein, 8 aa, Artificial Sequence
  Representative cyclic modulating agent based on cadherin-14 cell adhesion recognition sequence
CFSVDPKC

SEQ ID NO: 1953 - protein, 9 aa, Artificial Sequence
  Representative cyclic modulating agent based on cadherin-14 cell adhesion recognition sequence
CFSVDPKTC

SEQ ID NO: 1954 - protein, 10 aa, Artificial Sequence
  Representative cyclic modulating agent based on cadherin-14 cell adhesion recognition sequence
CFSVDPKTGC

SEQ ID NO: 1955 - protein, 9 aa, Artificial Sequence
  Representative cyclic modulating agent based on cadherin-14 cell adhesion recognition sequence
CYFSVDPKC

SEQ ID NO: 1956 - protein, 10 aa, Artificial Sequence
  Representative cyclic modulating agent based on cadherin-14 cell adhesion recognition sequence
CYFSVDPKTC

SEQ ID NO: 1957 - protein, 11 aa, Artificial Sequence
  Representative cyclic modulating agent based on cadherin-14 cell adhesion recognition sequence
CYFSVDPKTGC

SEQ ID NO: 1958 - protein, 5 aa, Artificial Sequence
  Representative cyclic modulating agent based on cadherin-14 cell adhesion recognition sequence
CDANC

SEQ ID NO: 1959 - protein, 6 aa, Artificial Sequence
  Representative cyclic modulating agent based on cadherin-14 cell adhesion recognition sequence
CDANTC

SEQ ID NO: 1960 - protein, 7 aa, Artificial Sequence
  Representative cyclic modulating agent based on cadherin-14 cell adhesion recognition sequence
CDANTGC

SEQ ID NO: 1961 - protein, 7 aa, Artificial Sequence
  Representative cyclic modulating agent based on cadherin-14 cell adhesion recognition sequence
CIDANTC

SEQ ID NO: 1962 - protein, 8 aa, Artificial Sequence
  Representative cyclic modulating agent based on cadherin-14 cell adhesion recognition sequence
CIDANTGC

SEQ ID NO: 1963 - protein, 8 aa, Artificial Sequence
  Representative cyclic modulating agent based on cadherin-14 cell adhesion recognition sequence
CNIDANTC

SEQ ID NO: 1964 - protein, 9 aa, Artificial Sequence
  Representative cyclic modulating agent based on cadherin-14 cell adhesion recognition sequence
CNIDANTGC

SEQ ID NO: 1965 - protein, 9 aa, Artificial Sequence
  Representative cyclic modulating agent based on cadherin-14 cell adhesion recognition sequence
CFNIDANTC

SEQ ID NO: 1966 - protein, 10 aa, Artificial Sequence
  Representative cyclic modulating agent based on cadherin-14 cell adhesion recognition sequence
CFNIDANTGC

SEQ ID NO: 1967 - protein, 9 aa, Artificial Sequence
  Representative cyclic modulating agent based on cadherin-14 cell adhesion recognition sequence
CFFNIDANC

SEQ ID NO: 1968 - protein, 10 aa, Artificial Sequence
  Representative cyclic modulating agent based on cadherin-14 cell adhesion recognition sequence
CFFNIDANTC

SEQ ID NO: 1969 - protein, 11 aa, Artificial Sequence
  Representative cyclic modulating agent based on cadherin-14 cell adhesion recognition sequence
CFFNIDANTGC

SEQ ID NO: 1970 - protein, 5 aa, Artificial Sequence
  Representative cyclic modulating agent based on cadherin-14 cell adhesion recognition sequence
EDPKK

SEQ ID NO: 1971 - protein, 6 aa, Artificial Sequence
  Representative cyclic modulating agent based on cadherin-14 cell adhesion recognition sequence
EDPKTK

SEQ ID NO: 1972 - protein, 7 aa, Artificial Sequence
  Representative cyclic modulating agent based on cadherin-14 cell adhesion recognition sequence
EDPKTGK

SEQ ID NO: 1973 - protein, 6 aa, Artificial Sequence
  Representative cyclic modulating agent based on cadherin-14 cell adhesion recognition sequence
EVDPKK

SEQ ID NO: 1974 - protein, 7 aa, Artificial Sequence
  Representative cyclic modulating agent based on cadherin-14 cell adhesion recognition sequence
EVDPKTK

SEQ ID NO: 1975 - protein, 8 aa, Artificial Sequence
  Representative cyclic modulating agent based on cadherin-14 cell adhesion recognition sequence
EVDPKTGK

SEQ ID NO: 1976 - protein, 7 aa, Artificial Sequence
  Representative cyclic modulating agent based on cadherin-14 cell adhesion recognition sequence
ESVDPKK

SEQ ID NO: 1977 - protein, 8 aa, Artificial Sequence
  Representative cyclic modulating agent based on cadherin-14 cell adhesion recognition sequence
ESVDPKTK

SEQ ID NO: 1978 - protein, 9 aa, Artificial Sequence
  Representative cyclic modulating agent based on cadherin-14 cell adhesion recognition sequence
ESVDPKTGK

SEQ ID NO: 1979 - protein, 8 aa, Artificial Sequence
  Representative cyclic modulating agent based on cadherin-14 cell adhesion recognition sequence
EFSVDPKK

SEQ ID NO: 1980 - protein, 9 aa, Artificial Sequence
  Representative cyclic modulating agent based on cadherin-14 cell adhesion recognition sequence
EFSVDPKTK

SEQ ID NO: 1981 - protein, 10 aa, Artificial Sequence
  Representative cyclic modulating agent based on cadherin-14 cell adhesion recognition sequence
EFSVDPKTGK

SEQ ID NO: 1982 - protein, 9 aa, Artificial Sequence
  Representative cyclic modulating agent based on cadherin-14 cell adhesion recognition sequence
EYFSVDPKK

SEQ ID NO: 1983 - protein, 10 aa, Artificial Sequence
  Representative cyclic modulating agent based on cadherin-14 cell adhesion recognition sequence
EYFSVDPKTK

SEQ ID NO: 1984 - protein, 11 aa, Artificial Sequence
  Representative cyclic modulating agent based on cadherin-14 cell adhesion recognition sequence
EYFSVDPKTGK

SEQ ID NO: 1985 - protein, 5 aa, Artificial Sequence
  Representative cyclic modulating agent based on cadherin-14 cell adhesion recognition sequence
EDANK

SEQ ID NO: 1986 - protein, 6 aa, Artificial Sequence
  Representative cyclic modulating agent based on cadherin-14 cell adhesion recognition sequence
EDANTK

SEQ ID NO: 1987 - protein, 7 aa, Artificial Sequence
  Representative cyclic modulating agent based on cadherin-14 cell adhesion recognition sequence
EDANTGK

SEQ ID NO: 1988 - protein, 7 aa, Artificial Sequence
  Representative cyclic modulating agent based on cadherin-14 cell adhesion recognition sequence
EIDANTK

SEQ ID NO: 1989 - protein, 8 aa, Artificial Sequence
  Representative cyclic modulating agent based on cadherin-14 cell adhesion recognition sequence
EIDANTGK

SEQ ID NO: 1990 - protein, 8 aa, Artificial Sequence
  Representative cyclic modulating agent based on cadherin-14 cell adhesion recognition sequence
ENIDANTK

SEQ ID NO: 1991 - protein, 9 aa, Artificial Sequence
  Representative cyclic modulating agent based on cadherin-14 cell adhesion recognition sequence
ENIDANTGK

SEQ ID NO: 1992 - protein, 9 aa, Artificial Sequence
  Representative cyclic modulating agent based on cadherin-14 cell adhesion recognition sequence
EFNIDANTK

SEQ ID NO: 1993 - protein, 10 aa, Artificial Sequence
  Representative cyclic modulating agent based on cadherin-14 cell adhesion recognition sequence
EFNIDANTGK

SEQ ID NO: 1994 - protein, 9 aa, Artificial Sequence
  Representative cyclic modulating agent based on cadherin-14 cell adhesion recognition sequence
EFFNIDANK

SEQ ID NO: 1995 - protein, 10 aa, Artificial Sequence
  Representative cyclic modulating agent based on cadherin-14 cell adhesion recognition sequence
EFFNIDANTK

SEQ ID NO: 1996 - protein, 11 aa, Artificial Sequence
  Representative cyclic modulating agent based on cadherin-14 cell adhesion recognition sequence
EFFNIDANTGK

SEQ ID NO: 1997 - protein, 6 aa, Artificial Sequence
  Representative cyclic modulating agent based on cadherin-14 cell adhesion recognition sequence
KVDPKD

SEQ ID NO: 1998 - protein, 7 aa, Artificial Sequence
  Representative cyclic modulating agent based on cadherin-14 cell adhesion recognition sequence
KVDPKTD

SEQ ID NO: 1999 - protein, 8 aa, Artificial Sequence
  Representative cyclic modulating agent based on cadherin-14 cell adhesion recognition sequence
KVDPKTGD

SEQ ID NO: 2000 - protein, 7 aa, Artificial Sequence
  Representative cyclic modulating agent based on cadherin-14 cell adhesion recognition sequence
KSVDPKD

SEQ ID NO: 2001 - protein, 8 aa, Artificial Sequence
  Representative cyclic modulating agent based on cadherin-14 cell adhesion recognition sequence
KSVDPKTD

SEQ ID NO: 2002 - protein, 9 aa, Artificial Sequence
  Representative cyclic modulating agent based on cadherin-14 cell adhesion recognition sequence
KSVDPKTGD

SEQ ID NO: 2003 - protein, 8 aa, Artificial Sequence
  Representative cyclic modulating agent based on cadherin-14 cell adhesion recognition sequence
KFSVDPKD

SEQ ID NO: 2004 - protein, 9 aa, Artificial Sequence
  Representative cyclic modulating agent based on cadherin-14 cell adhesion recognition sequence
KFSVDPKTD

SEQ ID NO: 2005 - protein, 10 aa, Artificial Sequence
  Representative cyclic modulating agent based on cadherin-14 cell adhesion recognition sequence
KFSVDPKTGD

SEQ ID NO: 2006 - protein, 9 aa, Artificial Sequence
  Representative cyclic modulating agent based on cadherin-14 cell adhesion recognition sequence
KYFSVDPKD

SEQ ID NO: 2007 - protein, 10 aa, Artificial Sequence
  Representative cyclic modulating agent based on cadherin-14 cell adhesion recognition sequence
KYFSVDPKTD

SEQ ID NO: 2008 - protein, 11 aa, Artificial Sequence
  Representative cyclic modulating agent based on cadherin-14 cell adhesion recognition sequence
KYFSVDPKTGD

SEQ ID NO: 2009 - protein, 6 aa, Artificial Sequence
  Representative cyclic modulating agent based on cadherin-14 cell adhesion recognition sequence
KDANTD

SEQ ID NO: 2010 - protein, 7 aa, Artificial Sequence
  Representative cyclic modulating agent based on cadherin-14 cell adhesion recognition sequence
KDANTGD

SEQ ID NO: 2011 - protein, 7 aa, Artificial Sequence
  Representative cyclic modulating agent based on cadherin-14 cell adhesion recognition sequence
KIDANTD

SEQ ID NO: 2012 - protein, 8 aa, Artificial Sequence
  Representative cyclic modulating agent based on cadherin-14 cell adhesion recognition sequence
KIDANTGD

SEQ ID NO: 2013 - protein, 8 aa, Artificial Sequence
  Representative cyclic modulating agent based on cadherin-14 cell adhesion recognition sequence
KNIDANTD

SEQ ID NO: 2014 - protein, 9 aa, Artificial Sequence
  Representative cyclic modulating agent based on cadherin-14 cell adhesion recognition sequence
KNIDANTGD

SEQ ID NO: 2015 - protein, 9 aa, Artificial Sequence
  Representative cyclic modulating agent based on cadherin-14 cell adhesion recognition sequence
KFNIDANTD

SEQ ID NO: 2016 - protein, 10 aa, Artificial Sequence
  Representative cyclic modulating agent based on cadherin-14 cell adhesion recognition sequence
KFNIDANTGD

SEQ ID NO: 2017 - protein, 9 aa, Artificial Sequence
  Representative cyclic modulating agent based on cadherin-14 cell adhesion recognition sequence
KFFNIDAND

SEQ ID NO: 2018 - protein, 10 aa, Artificial Sequence
  Representative cyclic modulating agent based on cadherin-14 cell adhesion recognition sequence
KFFNIDANTD

SEQ ID NO: 2019 - protein, 11 aa, Artificial Sequence
  Representative cyclic modulating agent based on cadherin-14 cell adhesion recognition sequence
KFFNIDANTGD

SEQ ID NO: 2020 - protein, 5 aa, Artificial Sequence
  Representative cyclic modulating agent based on cadherin-14 cell adhesion recognition sequence
DDPKK

SEQ ID NO: 2021 - protein, 6 aa, Artificial Sequence
  Representative cyclic modulating agent based on cadherin-14 cell adhesion recognition sequence
DDPKTK

SEQ ID NO: 2022 - protein, 7 aa, Artificial Sequence
  Representative cyclic modulating agent based on cadherin-14 cell adhesion recognition sequence
DDPKTGK

SEQ ID NO: 2023 - protein, 6 aa, Artificial Sequence
  Representative cyclic modulating agent based on cadherin-14 cell adhesion recognition sequence
DVDPKK

SEQ ID NO: 2024 - protein, 7 aa, Artificial Sequence
  Representative cyclic modulating agent based on cadherin-14 cell adhesion recognition sequence
DVDPKTK

SEQ ID NO: 2025 - protein, 8 aa, Artificial Sequence
  Representative cyclic modulating agent based on cadherin-14 cell adhesion recognition sequence
DVDPKTGK

SEQ ID NO: 2026 - protein, 7 aa, Artificial Sequence
  Representative cyclic modulating agent based on cadherin-14 cell adhesion recognition sequence
DSVDPKK

SEQ ID NO: 2027 - protein, 8 aa, Artificial Sequence
  Representative cyclic modulating agent based on cadherin-14 cell adhesion recognition sequence
DSVDPKTK

SEQ ID NO: 2028 - protein, 9 aa, Artificial Sequence
  Representative cyclic modulating agent based on cadherin-14 cell adhesion recognition sequence
DSVDPKTGK

SEQ ID NO: 2029 - protein, 8 aa, Artificial Sequence
  Representative cyclic modulating agent based on cadherin-14 cell adhesion recognition sequence
DFSVDPKK

SEQ ID NO: 2030 - protein, 9 aa, Artificial Sequence
  Representative cyclic modulating agent based on cadherin-14 cell adhesion recognition sequence
DFSVDPKTK

SEQ ID NO: 2031 - protein, 10 aa, Artificial Sequence
  Representative cyclic modulating agent based on cadherin-14 cell adhesion recognition sequence
DFSVDPKTGK

SEQ ID NO: 2032 - protein, 9 aa, Artificial Sequence
  Representative cyclic modulating agent based on cadherin-14 cell adhesion recognition sequence
DYFSVDPKK

SEQ ID NO: 2033 - protein, 10 aa, Artificial Sequence
  Representative cyclic modulating agent based on cadherin-14 cell adhesion recognition sequence
DYFSVDPKTK

SEQ ID NO: 2034 - protein, 11 aa, Artificial Sequence
  Representative cyclic modulating agent based on cadherin-14 cell adhesion recognition sequence
DYFSVDPKTGK

SEQ ID NO: 2035 - protein, 5 aa, Artificial Sequence
  Representative cyclic modulating agent based on cadherin-14 cell adhesion recognition sequence
DDANK

SEQ ID NO: 2036 - protein, 6 aa, Artificial Sequence
  Representative cyclic modulating agent based on cadherin-14 cell adhesion recognition sequence
DDANTK

SEQ ID NO: 2037 - protein, 7 aa, Artificial Sequence
  Representative cyclic modulating agent based on cadherin-14 cell adhesion recognition sequence
DDANTGK

SEQ ID NO: 2038 - protein, 7 aa, Artificial Sequence
  Representative cyclic modulating agent based on cadherin-14 cell adhesion recognition sequence
DIDANTK

SEQ ID NO: 2039 - protein, 8 aa, Artificial Sequence
  Representative cyclic modulating agent based on cadherin-14 cell adhesion recognition sequence
DIDANTGK

SEQ ID NO: 2040 - protein, 8 aa, Artificial Sequence
  Representative cyclic modulating agent based on cadherin-14 cell adhesion recognition sequence
DNIDANTK

SEQ ID NO: 2041 - protein, 9 aa, Artificial Sequence
  Representative cyclic modulating agent based on cadherin-14 cell adhesion recognition sequence
DNIDANTGK

SEQ ID NO: 2042 - protein, 9 aa, Artificial Sequence
  Representative cyclic modulating agent based on cadherin-14 cell adhesion recognition sequence
DFNIDANTC

SEQ ID NO: 2043 - protein, 10 aa, Artificial Sequence
  Representative cyclic modulating agent based on cadherin-14 cell adhesion recognition sequence
DFNIDANTGK

SEQ ID NO: 2044 - protein, 9 aa, Artificial Sequence
  Representative cyclic modulating agent based on cadherin-14 cell adhesion recognition sequence
DFFNIDANK

SEQ ID NO: 2045 - protein, 10 aa, Artificial Sequence
  Representative cyclic modulating agent based on cadherin-14 cell adhesion recognition sequence
DFFNIDANTK

SEQ ID NO: 2046 - protein, 11 aa, Artificial Sequence
  Representative cyclic modulating agent based on cadherin-14 cell adhesion recognition sequence
DFFNIDANTGK

SEQ ID NO: 2047 - protein, 6 aa, Artificial Sequence
  Representative cyclic modulating agent based on cadherin-14 cell adhesion recognition sequence
KVDPKE

SEQ ID NO: 2048 - protein, 7 aa, Artificial Sequence
  Representative cyclic modulating agent based on cadherin-14 cell adhesion recognition sequence
KVDPKTE

SEQ ID NO: 2049 - protein, 8 aa, Artificial Sequence
  Representative cyclic modulating agent based on cadherin-14 cell adhesion recognition sequence
KVDPKTGE

SEQ ID NO: 2050 - protein, 7 aa, Artificial Sequence
  Representative cyclic modulating agent based on cadherin-14 cell adhesion recognition sequence
KSVDPKE

SEQ ID NO: 2051 - protein, 8 aa, Artificial Sequence
  Representative cyclic modulating agent based on cadherin-14 cell adhesion recognition sequence
KSVDPKTE

SEQ ID NO: 2052 - protein, 9 aa, Artificial Sequence
  Representative cyclic modulating agent based on cadherin-14 cell adhesion recognition sequence
KSVDPKTGE

SEQ ID NO: 2053 - protein, 8 aa, Artificial Sequence
  Representative cyclic modulating agent based on cadherin-14 cell adhesion recognition sequence
KFSVDPKE

SEQ ID NO: 2054 - protein, 9 aa, Artificial Sequence
  Representative cyclic modulating agent based on cadherin-14 cell adhesion recognition sequence
KFSVDPKTE

SEQ ID NO: 2055 - protein, 10 aa, Artificial Sequence
  Representative cyclic modulating agent based on cadherin-14 cell adhesion recognition sequence
KFSVDPKTGE

SEQ ID NO: 2056 - protein, 9 aa, Artificial Sequence
  Representative cyclic modulating agent based on cadherin-14 cell adhesion recognition sequence
KYFSVDPKE

SEQ ID NO: 2057 - protein, 10 aa, Artificial Sequence
  Representative cyclic modulating agent based on cadherin-14 cell adhesion recognition sequence
KYFSVDPKTE

SEQ ID NO: 2058 - protein, 11 aa, Artificial Sequence
  Representative cyclic modulating agent based on cadherin-14 cell adhesion recognition sequence
KYFSVDPKTGE

SEQ ID NO: 2059 - protein, 5 aa, Artificial Sequence
  Representative cyclic modulating agent based on cadherin-14 cell adhesion recognition sequence
KDANE

SEQ ID NO: 2060 - protein, 6 aa, Artificial Sequence
  Representative cyclic modulating agent based on cadherin-14 cell adhesion recognition sequence
KDANTE

SEQ ID NO: 2061 - protein, 7 aa, Artificial Sequence
  Representative cyclic modulating agent based on cadherin-14 cell adhesion recognition sequence
KDANTGE

SEQ ID NO: 2062 - protein, 7 aa, Artificial Sequence
  Representative cyclic modulating agent based on cadherin-14 cell adhesion recognition sequence
KIDANTE

SEQ ID NO: 2063 - protein, 8 aa, Artificial Sequence
  Representative cyclic modulating agent based on cadherin-14 cell adhesion recognition sequence
KIDANTGE

SEQ ID NO: 2064 - protein, 8 aa, Artificial Sequence
  Representative cyclic modulating agent based on cadherin-14 cell adhesion recognition sequence
KNIDANTE

SEQ ID NO: 2065 - protein, 9 aa, Artificial Sequence
  Representative cyclic modulating agent based on cadherin-14 cell adhesion recognition sequence
KNIDANTGE

SEQ ID NO: 2066 - protein, 9 aa, Artificial Sequence
  Representative cyclic modulating agent based on cadherin-14 cell adhesion recognition sequence
KFNIDANTE

SEQ ID NO: 2067 - protein, 10 aa, Artificial Sequence
  Representative cyclic modulating agent based on cadherin-14 cell adhesion recognition sequence
KFNIDANTGE

SEQ ID NO: 2068 - protein, 9 aa, Artificial Sequence
  Representative cyclic modulating agent based on cadherin-14 cell adhesion recognition sequence
KFFNIDANE

SEQ ID NO: 2069 - protein, 10 aa, Artificial Sequence
  Representative cyclic modulating agent based on cadherin-14 cell adhesion recognition sequence
KFFNIDANTE

SEQ ID NO: 2070 - protein, 11 aa, Artificial Sequence
  Representative cyclic modulating agent based on cadherin-14 cell adhesion recognition sequence
KFFNIDANTGE

SEQ ID NO: 2071 - protein, 5 aa, Artificial Sequence
  Representative cyclic modulating agent based on cadherin-14 cell adhesion recognition sequence
VDPKT

SEQ ID NO: 2072 - protein, 6 aa, Artificial Sequence
  Representative cyclic modulating agent based on cadherin-14 cell adhesion recognition sequence
VDPKTG

SEQ ID NO: 2073 - protein, 5 aa, Artificial Sequence
  Representative cyclic modulating agent based on cadherin-14 cell adhesion recognition sequence
SVDPK

SEQ ID NO: 2074 - protein, 6 aa, Artificial Sequence
  Representative cyclic modulating agent based on cadherin-14 cell adhesion recognition sequence
SVDPKT

SEQ ID NO: 2075 - protein, 7 aa, Artificial Sequence
  Representative cyclic modulating agent based on cadherin-14 cell adhesion recognition sequence
SVDPKTG

SEQ ID NO: 2076 - protein, 6 aa, Artificial Sequence
  Representative cyclic modulating agent based on cadherin-14 cell adhesion recognition sequence
FSVDPK

SEQ ID NO: 2077 - protein, 7 aa, Artificial Sequence
  Representative cyclic modulating agent based on cadherin-14 cell adhesion recognition sequence
FSVDPKT

SEQ ID NO: 2078 - protein, 8 aa, Artificial Sequence
  Representative cyclic modulating agent based on cadherin-14 cell adhesion recognition sequence
FSVDPKTG

SEQ ID NO: 2079 - protein, 7 aa, Artificial Sequence
  Representative cyclic modulating agent based on cadherin-14 cell adhesion recognition sequence
YFSVDPK

SEQ ID NO: 2080 - protein, 8 aa, Artificial Sequence
  Representative cyclic modulating agent based on cadherin-14 cell adhesion recognition sequence
YFSVDPKT

SEQ ID NO: 2081 - protein, 9 aa, Artificial Sequence
  Representative cyclic modulating agent based on cadherin-14 cell adhesion recognition sequence
YFSVDPKTG

SEQ ID NO: 2082 - protein, 5 aa, Artificial Sequence
  Representative cyclic modulating agent based on cadherin-14 cell adhesion recognition sequence
DANTG

SEQ ID NO: 2083 - protein, 5 aa, Artificial Sequence
  Representative cyclic modulating agent based on cadherin-14 cell adhesion recognition sequence
IDANT

SEQ ID NO: 2084 - protein, 6 aa, Artificial Sequence
  Representative cyclic modulating agent based on cadherin-14 cell adhesion recognition sequence
IDANTG

SEQ ID NO: 2085 - protein, 6 aa, Artificial Sequence
  Representative cyclic modulating agent based on cadherin-14 cell adhesion recognition sequence
NIDANT

SEQ ID NO: 2086 - protein, 7 aa, Artificial Sequence
  Representative cyclic modulating agent based on cadherin-14 cell adhesion recognition sequence
NIDANTG

SEQ ID NO: 2087 - protein, 7 aa, Artificial Sequence
  Representative cyclic modulating agent based on cadherin-14 cell adhesion recognition sequence
FNIDANT

SEQ ID NO: 2088 - protein, 8 aa, Artificial Sequence
  Representative cyclic modulating agent based on cadherin-14 cell adhesion recognition sequence
FNIDANTG

SEQ ID NO: 2089 - protein, 7 aa, Artificial Sequence
  Representative cyclic modulating agent based on cadherin-14 cell adhesion recognition sequence
FFNIDAN

SEQ ID NO: 2090 - protein, 8 aa, Artificial Sequence
  Representative cyclic modulating agent based on cadherin-14 cell adhesion recognition sequence
FFNIDANT

SEQ ID NO: 2091 - protein, 9 aa, Artificial Sequence
  Representative cyclic modulating agent based on cadherin-14 cell adhesion recognition sequence
FFNIDANTG

SEQ ID NO: 2092 - protein, 5 aa, Artificial Sequence
  Representative cyclic modulating agent based on cadherin-15 cell adhesion recognition sequence
CDKFC

SEQ ID NO: 2093 - protein, 6 aa, Artificial Sequence
  Representative cyclic modulating agent based on cadherin-15 cell adhesion recognition sequence
CIDKFC

SEQ ID NO: 2094 - protein, 6 aa, Artificial Sequence
  Representative cyclic modulating agent based on cadherin-15 cell adhesion recognition sequence
CDKFTC

SEQ ID NO: 2095 - protein, 7 aa, Artificial Sequence
  Representative cyclic modulating agent based on cadherin-15 cell adhesion recognition sequence
CSIDKFC

SEQ ID NO: 2096 - protein, 7 aa, Artificial Sequence
  Representative cyclic modulating agent based on cadherin-15 cell adhesion recognition sequence
CIDKFTC

SEQ ID NO: 2097 - protein, 8 aa, Artificial Sequence
  Representative cyclic modulating agent based on cadherin-15 cell adhesion recognition sequence
CSIDKFTC

SEQ ID NO: 2098 - protein, 7 aa, Artificial Sequence
  Representative cyclic modulating agent based on cadherin-15 cell adhesion recognition sequence
CDKFTGC

SEQ ID NO: 2099 - protein, 8 aa, Artificial Sequence
  Representative cyclic modulating agent based on cadherin-15 cell adhesion recognition sequence
CIDKFTGC

SEQ ID NO: 2100 - protein, 9 aa, Artificial Sequence
  Representative cyclic modulating agent based on cadherin-15 cell adhesion recognition sequence
CSIDKFTGC

SEQ ID NO: 2101 - protein, 8 aa, Artificial Sequence
  Representative cyclic modulating agent based on cadherin-15 cell adhesion recognition sequence
CFSIDKFC

SEQ ID NO: 2102 - protein, 9 aa, Artificial Sequence
  Representative cyclic modulating agent based on cadherin-15 cell adhesion recognition sequence
CFSIDKFTC

SEQ ID NO: 2103 - protein, 10 aa, Artificial Sequence
  Representative cyclic modulating agent based on cadherin-15 cell adhesion recognition sequence
CFSIDKFTGC

SEQ ID NO: 2104 - protein, 9 aa, Artificial Sequence
  Representative cyclic modulating agent based on cadherin-15 cell adhesion recognition sequence
CVFSIDKFC

SEQ ID NO: 2105 - protein, 10 aa, Artificial Sequence
  Representative cyclic modulating agent based on cadherin-15 cell adhesion recognition sequence
CVFSIDKFTC

SEQ ID NO: 2106 - protein, 11 aa, Artificial Sequence
  Representative cyclic modulating agent based on cadherin-15 cell adhesion recognition sequence
CVFSIDKFTGC

SEQ ID NO: 2107 - protein, 6 aa, Artificial Sequence
  Representative cyclic modulating agent based on cadherin-15 cell adhesion recognition sequence
DDKFTK

SEQ ID NO: 2108 - protein, 5 aa, Artificial Sequence
  Representative cyclic modulating agent based on cadherin-15 cell adhesion recognition sequence
DDKFK

SEQ ID NO: 2109 - protein, 6 aa, Artificial Sequence
  Representative cyclic modulating agent based on cadherin-15 cell adhesion recognition sequence
DIDKFK

SEQ ID NO: 2110 - protein, 7 aa, Artificial Sequence
  Representative cyclic modulating agent based on cadherin-15 cell adhesion recognition sequence
DSIDKFK

SEQ ID NO: 2111 - protein, 8 aa, Artificial Sequence
  Representative cyclic modulating agent based on cadherin-15 cell adhesion recognition sequence
DFSIDKFK

SEQ ID NO: 2112 - protein, 9 aa, Artificial Sequence
  Representative cyclic modulating agent based on cadherin-15 cell adhesion recognition sequence
DVFSIDKFK

SEQ ID NO: 2113 - protein, 5 aa, Artificial Sequence
  Representative cyclic modulating agent based on cadherin-15 cell adhesion recognition sequence
EDKFK

SEQ ID NO: 2114 - protein, 6 aa, Artificial Sequence
  Representative cyclic modulating agent based on cadherin-15 cell adhesion recognition sequence
EIDKFK

SEQ ID NO: 2115 - protein, 7 aa, Artificial Sequence
  Representative cyclic modulating agent based on cadherin-15 cell adhesion recognition sequence
ESIDKFK

SEQ ID NO: 2116 - protein, 8 aa, Artificial Sequence
  Representative cyclic modulating agent based on cadherin-15 cell adhesion recognition sequence
EFSIDKFK

SEQ ID NO: 2117 - protein, 9 aa, Artificial Sequence
  Representative cyclic modulating agent based on cadherin-15 cell adhesion recognition sequence
EVFSIDKFK

SEQ ID NO: 2118 - protein, 5 aa, Artificial Sequence
  Representative cyclic modulating agent based on cadherin-15 cell adhesion recognition sequence
KDKFD

SEQ ID NO: 2119 - protein, 6 aa, Artificial Sequence
  Representative cyclic modulating agent based on cadherin-15 cell adhesion recognition sequence
KIDKFD

SEQ ID NO: 2120 - protein, 6 aa, Artificial Sequence
  Representative cyclic modulating agent based on cadherin-15 cell adhesion recognition sequence
KDKFTD

SEQ ID NO: 2121 - protein, 7 aa, Artificial Sequence
  Representative cyclic modulating agent based on cadherin-15 cell adhesion recognition sequence
KSIDKFD

SEQ ID NO: 2122 - protein, 7 aa, Artificial Sequence
  Representative cyclic modulating agent based on cadherin-15 cell adhesion recognition sequence
KIDKFTD

SEQ ID NO: 2123 - protein, 8 aa, Artificial Sequence
  Representative cyclic modulating agent based on cadherin-15 cell adhesion recognition sequence
KSIDKFTD

SEQ ID NO: 2124 - protein, 7 aa, Artificial Sequence
  Representative cyclic modulating agent based on cadherin-15 cell adhesion recognition sequence
KDKFTGD

SEQ ID NO: 2125 - protein, 8 aa, Artificial Sequence
  Representative cyclic modulating agent based on cadherin-15 cell adhesion recognition sequence
KIDKFTGD

SEQ ID NO: 2126 - protein, 9 aa, Artificial Sequence
  Representative cyclic modulating agent based on cadherin-15 cell adhesion recognition sequence
KSIDKFTGD

SEQ ID NO: 2127 - protein, 8 aa, Artificial Sequence
  Representative cyclic modulating agent based on cadherin-15 cell adhesion recognition sequence
KFSIDKFD

SEQ ID NO: 2128 - protein, 9 aa, Artificial Sequence
  Representative cyclic modulating agent based on cadherin-15 cell adhesion recognition sequence
KFSIDKFTD

SEQ ID NO: 2129 - protein, 10 aa, Artificial Sequence
  Representative cyclic modulating agent based on cadherin-15 cell adhesion recognition sequence
KFSIDKFTGD

SEQ ID NO: 2130 - protein, 9 aa, Artificial Sequence
  Representative cyclic modulating agent based on cadherin-15 cell adhesion recognition sequence
KVFSIDKFD

SEQ ID NO: 2131 - protein, 10 aa, Artificial Sequence
  Representative cyclic modulating agent based on cadherin-15 cell adhesion recognition sequence
KVFSIDKFTD

SEQ ID NO: 2132 - protein, 11 aa, Artificial Sequence
  Representative cyclic modulating agent based on cadherin-15 cell adhesion recognition sequence
KVFSIDKFTGD

SEQ ID NO: 2133 - protein, 9 aa, Artificial Sequence
  Representative cyclic modulating agent based on cadherin-15 cell adhesion recognition sequence
DIDKFTHEK

SEQ ID NO: 2134 - protein, 5 aa, Artificial Sequence
  Representative cyclic modulating agent based on cadherin-15 cell adhesion recognition sequence
IDKFT

SEQ ID NO: 2135 - protein, 6 aa, Artificial Sequence
  Representative cyclic modulating agent based on cadherin-15 cell adhesion recognition sequence
SIDKFT

SEQ ID NO: 2136 - protein, 5 aa, Artificial Sequence
  Representative cyclic modulating agent based on cadherin-15 cell adhesion recognition sequence
DKFTG

SEQ ID NO: 2137 - protein, 6 aa, Artificial Sequence
  Representative cyclic modulating agent based on cadherin-15 cell adhesion recognition sequence
IDKFTG

SEQ ID NO: 2138 - protein, 5 aa, Artificial Sequence
  Representative cyclic modulating agent based on cadherin-15 cell adhesion recognition sequence
KDKFE

SEQ ID NO: 2139 - protein, 6 aa, Artificial Sequence
  Representative cyclic modulating agent based on cadherin-15 cell adhesion recognition sequence
KIDKFE

SEQ ID NO: 2140 - protein, 6 aa, Artificial Sequence
  Representative cyclic modulating agent based on cadherin-15 cell adhesion recognition sequence
KDKFTE

SEQ ID NO: 2141 - protein, 7 aa, Artificial Sequence
  Representative cyclic modulating agent based on cadherin-15 cell adhesion recognition sequence
KSIDKFE

SEQ ID NO: 2142 - protein, 7 aa, Artificial Sequence
  Representative cyclic modulating agent based on cadherin-15 cell adhesion recognition sequence
KIDKFTE

SEQ ID NO: 2143 - protein, 8 aa, Artificial Sequence
  Representative cyclic modulating agent based on cadherin-15 cell adhesion recognition sequence
KSIDKFTE

SEQ ID NO: 2144 - protein, 7 aa, Artificial Sequence
  Representative cyclic modulating agent based on cadherin-15 cell adhesion recognition sequence
KDKFTGE

SEQ ID NO: 2145 - protein, 8 aa, Artificial Sequence
  Representative cyclic modulating agent based on cadherin-15 cell adhesion recognition sequence
KIDKFTGE

SEQ ID NO: 2146 - protein, 9 aa, Artificial Sequence
  Representative cyclic modulating agent based on cadherin-15 cell adhesion recognition sequence
KSIDKFTGE

SEQ ID NO: 2147 - protein, 8 aa, Artificial Sequence
  Representative cyclic modulating agent based on cadherin-15 cell adhesion recognition sequence
KFSIDKFE

SEQ ID NO: 2148 - protein, 9 aa, Artificial Sequence
  Representative cyclic modulating agent based on cadherin-15 cell adhesion recognition sequence
KFSIDKFTE

SEQ ID NO: 2149 - protein, 10 aa, Artificial Sequence
  Representative cyclic modulating agent based on cadherin-15 cell adhesion recognition sequence
KFSIDKFTGE

SEQ ID NO: 2150 - protein, 9 aa, Artificial Sequence
  Representative cyclic modulating agent based on cadherin-15 cell adhesion recognition sequence
KVFSIDKFE

SEQ ID NO: 2151 - protein, 10 aa, Artificial Sequence
  Representative cyclic modulating agent based on cadherin-15 cell adhesion recognition sequence
KIFSIDKFTE

SEQ ID NO: 2152 - protein, 11 aa, Artificial Sequence
  Representative cyclic modulating agent based on cadherin-15 cell adhesion recognition sequence
KVFSIDKFTGE

SEQ ID NO: 2153 - protein, 5 aa, Artificial Sequence
  Representative cyclic modulating agent based on cadherin-15 cell adhesion recognition sequence
CDELC

SEQ ID NO: 2154 - protein, 6 aa, Artificial Sequence
  Representative cyclic modulating agent based on cadherin-15 cell adhesion recognition sequence
CDELTC

SEQ ID NO: 2155 - protein, 7 aa, Artificial Sequence
  Representative cyclic modulating agent based on cadherin-15 cell adhesion recognition sequence
CDELTGC

SEQ ID NO: 2156 - protein, 6 aa, Artificial Sequence
  Representative cyclic modulating agent based on cadherin-15 cell adhesion recognition sequence
CIDELC

SEQ ID NO: 2157 - protein, 7 aa, Artificial Sequence
  Representative cyclic modulating agent based on cadherin-15 cell adhesion recognition sequence
CIDELTC

SEQ ID NO: 2158 - protein, 8 aa, Artificial Sequence
  Representative cyclic modulating agent based on cadherin-15 cell adhesion recognition sequence
CIDELTGC

SEQ ID NO: 2159 - protein, 7 aa, Artificial Sequence
  Representative cyclic modulating agent based on cadherin-15 cell adhesion recognition sequence
CSIDELC

SEQ ID NO: 2160 - protein, 8 aa, Artificial Sequence
  Representative cyclic modulating agent based on cadherin-15 cell adhesion recognition sequence
CSIDELTC

SEQ ID NO: 2161 - protein, 9 aa, Artificial Sequence
  Representative cyclic modulating agent based on cadherin-15 cell adhesion recognition sequence
CSIDELTGC

SEQ ID NO: 2162 - protein, 8 aa, Artificial Sequence
  Representative cyclic modulating agent based on cadherin-15 cell adhesion recognition sequence
CFSIDELC

SEQ ID NO: 2163 - protein, 9 aa, Artificial Sequence
  Representative cyclic modulating agent based on cadherin-15 cell adhesion recognition sequence
CFSIDELTC

SEQ ID NO: 2164 - protein, 10 aa, Artificial Sequence
  Representative cyclic modulating agent based on cadherin-15 cell adhesion recognition sequence
CFSIDELTGC

SEQ ID NO: 2165 - protein, 9 aa, Artificial Sequence
  Representative cyclic modulating agent based on cadherin-15 cell adhesion recognition sequence
CLFSIDELC

SEQ ID NO: 2166 - protein, 10 aa, Artificial Sequence
  Representative cyclic modulating agent based on cadherin-15 cell adhesion recognition sequence
CLFSIDELTC

SEQ ID NO: 2167 - protein, 11 aa, Artificial Sequence
  Representative cyclic modulating agent based on cadherin-15 cell adhesion recognition sequence
CLFSIDELTGC

SEQ ID NO: 2168 - protein, 6 aa, Artificial Sequence
  Representative cyclic modulating agent based on cadherin-15 cell adhesion recognition sequence
EDELCK

SEQ ID NO: 2169 - protein, 6 aa, Artificial Sequence
  Representative cyclic modulating agent based on cadherin-15 cell adhesion recognition sequence
EDELTK

SEQ ID NO: 2170 - protein, 7 aa, Artificial Sequence
  Representative cyclic modulating agent based on cadherin-15 cell adhesion recognition sequence
EDELTGK

SEQ ID NO: 2171 - protein, 6 aa, Artificial Sequence
  Representative cyclic modulating agent based on cadherin-15 cell adhesion recognition sequence
EIDELK

SEQ ID NO: 2172 - protein, 7 aa, Artificial Sequence
  Representative cyclic modulating agent based on cadherin-15 cell adhesion recognition sequence
EIDELTK

SEQ ID NO: 2173 - protein, 8 aa, Artificial Sequence
  Representative cyclic modulating agent based on cadherin-15 cell adhesion recognition sequence
EIDELTGK

SEQ ID NO: 2174 - protein, 7 aa, Artificial Sequence
  Representative cyclic modulating agent based on cadherin-15 cell adhesion recognition sequence
ESIDELK

SEQ ID NO: 2175 - protein, 8 aa, Artificial Sequence
  Representative cyclic modulating agent based on cadherin-15 cell adhesion recognition sequence
ESIDELTK

SEQ ID NO: 2176 - protein, 9 aa, Artificial Sequence
  Representative cyclic modulating agent based on cadherin-15 cell adhesion recognition sequence
ESIDELTGK

SEQ ID NO: 2177 - protein, 8 aa, Artificial Sequence
  Representative cyclic modulating agent based on cadherin-15 cell adhesion recognition sequence
EFSIDELK

SEQ ID NO: 2178 - protein, 9 aa, Artificial Sequence
  Representative cyclic modulating agent based on cadherin-15 cell adhesion recognition sequence
EFSIDELTK

SEQ ID NO: 2179 - protein, 10 aa, Artificial Sequence
  Representative cyclic modulating agent based on cadherin-15 cell adhesion recognition sequence
EFSIDELTGK

SEQ ID NO: 2180 - protein, 9 aa, Artificial Sequence
  Representative cyclic modulating agent based on cadherin-15 cell adhesion recognition sequence
ELFSIDELK

SEQ ID NO: 2181 - protein, 10 aa, Artificial Sequence
  Representative cyclic modulating agent based on cadherin-15 cell adhesion recognition sequence
ELFSIDELTK

SEQ ID NO: 2182 - protein, 11 aa, Artificial Sequence
  Representative cyclic modulating agent based on cadherin-15 cell adhesion recognition sequence
ELFSIDELTGK

SEQ ID NO: 2183 - protein, 5 aa, Artificial Sequence
  Representative cyclic modulating agent based on cadherin-15 cell adhesion recognition sequence
KDELD

SEQ ID NO: 2184 - protein, 6 aa, Artificial Sequence
  Representative cyclic modulating agent based on cadherin-15 cell adhesion recognition sequence
KDELTD

SEQ ID NO: 2185 - protein, 7 aa, Artificial Sequence
  Representative cyclic modulating agent based on cadherin-15 cell adhesion recognition sequence
KDELTGD

SEQ ID NO: 2186 - protein, 6 aa, Artificial Sequence
  Representative cyclic modulating agent based on cadherin-15 cell adhesion recognition sequence
KIDELD

SEQ ID NO: 2187 - protein, 7 aa, Artificial Sequence
  Representative cyclic modulating agent based on cadherin-15 cell adhesion recognition sequence
KIDELTD

SEQ ID NO: 2188 - protein, 8 aa, Artificial Sequence
  Representative cyclic modulating agent based on cadherin-15 cell adhesion recognition sequence
KIDELTGD

SEQ ID NO: 2189 - protein, 7 aa, Artificial Sequence
  Representative cyclic modulating agent based on cadherin-15 cell adhesion recognition sequence
KSIDELD

SEQ ID NO: 2190 - protein, 8 aa, Artificial Sequence
  Representative cyclic modulating agent based on cadherin-15 cell adhesion recognition sequence
KSIDELTD

SEQ ID NO: 2191 - protein, 9 aa, Artificial Sequence
  Representative cyclic modulating agent based on cadherin-15 cell adhesion recognition sequence
KSIDELTGD

SEQ ID NO: 2192 - protein, 8 aa, Artificial Sequence
  Representative cyclic modulating agent based on cadherin-15 cell adhesion recognition sequence
KFSIDELD

SEQ ID NO: 2193 - protein, 9 aa, Artificial Sequence
  Representative cyclic modulating agent based on cadherin-15 cell adhesion recognition sequence
KFSIDELTD

SEQ ID NO: 2194 - protein, 10 aa, Artificial Sequence
  Representative cyclic modulating agent based on cadherin-15 cell adhesion recognition sequence
KFSIDELTGD

SEQ ID NO: 2195 - protein, 9 aa, Artificial Sequence
  Representative cyclic modulating agent based on cadherin-15 cell adhesion recognition sequence
KLFSIDELD

SEQ ID NO: 2196 - protein, 10 aa, Artificial Sequence
  Representative cyclic modulating agent based on cadherin-15 cell adhesion recognition sequence
KLFSIDELTD

SEQ ID NO: 2197 - protein, 11 aa, Artificial Sequence
  Representative cyclic modulating agent based on cadherin-15 cell adhesion recognition sequence
KLFSIDELTGD

SEQ ID NO: 2198 - protein, 5 aa, Artificial Sequence
  Representative cyclic modulating agent based on cadherin-15 cell adhesion recognition sequence
DDELK

SEQ ID NO: 2199 - protein, 6 aa, Artificial Sequence
  Representative cyclic modulating agent based on cadherin-15 cell adhesion recognition sequence
DDELTK

SEQ ID NO: 2200 - protein, 7 aa, Artificial Sequence
  Representative cyclic modulating agent based on cadherin-15 cell adhesion recognition sequence
DDELTGK

SEQ ID NO: 2201 - protein, 6 aa, Artificial Sequence
  Representative cyclic modulating agent based on cadherin-15 cell adhesion recognition sequence
DIDELK

SEQ ID NO: 2202 - protein, 7 aa, Artificial Sequence
  Representative cyclic modulating agent based on cadherin-15 cell adhesion recognition sequence
DIDELTK

SEQ ID NO: 2203 - protein, 8 aa, Artificial Sequence
  Representative cyclic modulating agent based on cadherin-15 cell adhesion recognition sequence
DIDELTGK

SEQ ID NO: 2204 - protein, 7 aa, Artificial Sequence
  Representative cyclic modulating agent based on cadherin-15 cell adhesion recognition sequence
DSIDELK

SEQ ID NO: 2205 - protein, 8 aa, Artificial Sequence
  Representative cyclic modulating agent based on cadherin-15 cell adhesion recognition sequence
DSIDELTK

SEQ ID NO: 2206 - protein, 9 aa, Artificial Sequence
  Representative cyclic modulating agent based on cadherin-15 cell adhesion recognition sequence
DSIDELTGK

SEQ ID NO: 2207 - protein, 8 aa, Artificial Sequence
  Representative cyclic modulating agent based on cadherin-15 cell adhesion recognition sequence
DFSIDELK

SEQ ID NO: 2208 - protein, 9 aa, Artificial Sequence
  Representative cyclic modulating agent based on cadherin-15 cell adhesion recognition sequence
DFSIDELTK

SEQ ID NO: 2209 - protein, 10 aa, Artificial Sequence
  Representative cyclic modulating agent based on cadherin-15 cell adhesion recognition sequence
DFSIDELTGK

SEQ ID NO: 2210 - protein, 9 aa, Artificial Sequence
  Representative cyclic modulating agent based on cadherin-15 cell adhesion recognition sequence
DLFSIDELK

SEQ ID NO: 2211 - protein, 10 aa, Artificial Sequence
  Representative cyclic modulating agent based on cadherin-15 cell adhesion recognition sequence
DLFSIDELTK

SEQ ID NO: 2212 - protein, 11 aa, Artificial Sequence
  Representative cyclic modulating agent based on cadherin-15 cell adhesion recognition sequence
DLFSIDELTGK

SEQ ID NO: 2213 - protein, 5 aa, Artificial Sequence
  Representative cyclic modulating agent based on cadherin-15 cell adhesion recognition sequence
KDELE

SEQ ID NO: 2214 - protein, 6 aa, Artificial Sequence
  Representative cyclic modulating agent based on cadherin-15 cell adhesion recognition sequence
KDELTE

SEQ ID NO: 2215 - protein, 7 aa, Artificial Sequence
  Representative cyclic modulating agent based on cadherin-15 cell adhesion recognition sequence
KDELTGE

SEQ ID NO: 2216 - protein, 6 aa, Artificial Sequence
  Representative cyclic modulating agent based on cadherin-15 cell adhesion recognition sequence
KIDELE

SEQ ID NO: 2217 - protein, 7 aa, Artificial Sequence
  Representative cyclic modulating agent based on cadherin-15 cell adhesion recognition sequence
KIDELTE

SEQ ID NO: 2218 - protein, 8 aa, Artificial Sequence
  Representative cyclic modulating agent based on cadherin-15 cell adhesion recognition sequence
KIDELTGE

SEQ ID NO: 2219 - protein, 7 aa, Artificial Sequence
  Representative cyclic modulating agent based on cadherin-15 cell adhesion recognition sequence
KSIDELE

SEQ ID NO: 2220 - protein, 8 aa, Artificial Sequence
  Representative cyclic modulating agent based on cadherin-15 cell adhesion recognition sequence
KSIDELTE

SEQ ID NO: 2221 - protein, 9 aa, Artificial Sequence
  Representative cyclic modulating agent based on cadherin-15 cell adhesion recognition sequence
KSIDELTGE

SEQ ID NO: 2222 - protein, 8 aa, Artificial Sequence
  Representative cyclic modulating agent based on cadherin-15 cell adhesion recognition sequence
KFSIDELE

SEQ ID NO: 2223 - protein, 9 aa, Artificial Sequence
  Representative cyclic modulating agent based on cadherin-15 cell adhesion recognition sequence
KFSIDELTE

SEQ ID NO: 2224 - protein, 10 aa, Artificial Sequence
  Representative cyclic modulating agent based on cadherin-15 cell adhesion recognition sequence
KFSIDELTGE

SEQ ID NO: 2225 - protein, 9 aa, Artificial Sequence
  Representative cyclic modulating agent based on cadherin-15 cell adhesion recognition sequence
KLFSIDELE

SEQ ID NO: 2226 - protein, 10 aa, Artificial Sequence
  Representative cyclic modulating agent based on cadherin-15 cell adhesion recognition sequence
KLFSIDELTE

SEQ ID NO: 2227 - protein, 11 aa, Artificial Sequence
  Representative cyclic modulating agent based on cadherin-15 cell adhesion recognition sequence
KLFSIDELTGE

SEQ ID NO: 2228 - protein, 5 aa, Artificial Sequence
  Representative cyclic modulating agent based on cadherin-15 cell adhesion recognition sequence
DELTG

SEQ ID NO: 2229 - protein, 5 aa, Artificial Sequence
  Representative cyclic modulating agent based on cadherin-15 cell adhesion recognition sequence
IDELT

SEQ ID NO: 2230 - protein, 6 aa, Artificial Sequence
  Representative cyclic modulating agent based on cadherin-15 cell adhesion recognition sequence
IDELTG

SEQ ID NO: 2231 - protein, 5 aa, Artificial Sequence
  Representative cyclic modulating agent based on cadherin-15 cell adhesion recognition sequence
SIDEL

SEQ ID NO: 2232 - protein, 6 aa, Artificial Sequence
  Representative cyclic modulating agent based on cadherin-15 cell adhesion recognition sequence
SIDELT

SEQ ID NO: 2233 - protein, 7 aa, Artificial Sequence
  Representative cyclic modulating agent based on cadherin-15 cell adhesion recognition sequence
SIDELTG

SEQ ID NO: 2234 - protein, 6 aa, Artificial Sequence
  Representative cyclic modulating agent based on cadherin-15 cell adhesion recognition sequence
FSIDEL

SEQ ID NO: 2235 - protein, 7 aa, Artificial Sequence
  Representative cyclic modulating agent based on cadherin-15 cell adhesion recognition sequence
FSIDELT

SEQ ID NO: 2236 - protein, 8 aa, Artificial Sequence
  Representative cyclic modulating agent based on cadherin-15 cell adhesion recognition sequence
FSIDELTG

SEQ ID NO: 2237 - protein, 7 aa, Artificial Sequence
  Representative cyclic modulating agent based on cadherin-15 cell adhesion recognition sequence
LFSIDEL

SEQ ID NO: 2238 - protein, 8 aa, Artificial Sequence
  Representative cyclic modulating agent based on cadherin-15 cell adhesion recognition sequence
LFSIDELT

SEQ ID NO: 2239 - protein, 9 aa, Artificial Sequence
  Representative cyclic modulating agent based on cadherin-15 cell adhesion recognition sequence
LFSIDELTG

SEQ ID NO: 2240 - protein, 5 aa, Artificial Sequence
  Representative cyclic modulating agent based on T-cadherin cell adhesion recognition sequence
CNENC

SEQ ID NO: 2241 - protein, 6 aa, Artificial Sequence
  Representative cyclic modulating agent based on T-cadherin cell adhesion recognition sequence
CINENC

SEQ ID NO: 2242 - protein, 6 aa, Artificial Sequence
  Representative cyclic modulating agent based on T-cadherin cell adhesion recognition sequence
CNENTC

SEQ ID NO: 2243 - protein, 7 aa, Artificial Sequence
  Representative cyclic modulating agent based on T-cadherin cell adhesion recognition sequence
CRINENC

SEQ ID NO: 2244 - protein, 7 aa, Artificial Sequence
  Representative cyclic modulating agent based on T-cadherin cell adhesion recognition sequence
CINENTC

SEQ ID NO: 2245 - protein, 8 aa, Artificial Sequence
  Representative cyclic modulating agent based on T-cadherin cell adhesion recognition sequence
CRINENTC

SEQ ID NO: 2246 - protein, 7 aa, Artificial Sequence
  Representative cyclic modulating agent based on T-cadherin cell adhesion recognition sequence
CNENTGC

SEQ ID NO: 2247 - protein, 8 aa, Artificial Sequence
  Representative cyclic modulating agent based on T-cadherin cell adhesion recognition sequence
CINENTGC

SEQ ID NO: 2248 - protein, 9 aa, Artificial Sequence
  Representative cyclic modulating agent based on T-cadherin cell adhesion recognition sequence
CRINENTGC

SEQ ID NO: 2249 - protein, 8 aa, Artificial Sequence
  Representative cyclic modulating agent based on T-cadherin cell adhesion recognition sequence
CFRINENC

SEQ ID NO: 2250 - protein, 9 aa, Artificial Sequence
  Representative cyclic modulating agent based on T-cadherin cell adhesion recognition sequence
CFRINENTC

SEQ ID NO: 2251 - protein, 10 aa, Artificial Sequence
  Representative cyclic modulating agent based on T-cadherin cell adhesion recognition sequence
CFRINENTGC

SEQ ID NO: 2252 - protein, 9 aa, Artificial Sequence
  Representative cyclic modulating agent based on T-cadherin cell adhesion recognition sequence
CIFRINENC

SEQ ID NO: 2253 - protein, 10 aa, Artificial Sequence
  Representative cyclic modulating agent based on T-cadherin cell adhesion recognition sequence
CIFRINENTC

SEQ ID NO: 2254 - protein, 11 aa, Artificial Sequence
  Representative cyclic modulating agent based on T-cadherin cell adhesion recognition sequence
CIFRINENTGC

SEQ ID NO: 2255 - protein, 5 aa, Artificial Sequence
  Representative cyclic modulating agent based on T-cadherin cell adhesion recognition sequence
DNENK

SEQ ID NO: 2256 - protein, 6 aa, Artificial Sequence
  Representative cyclic modulating agent based on T-cadherin cell adhesion recognition sequence
DINENK

SEQ ID NO: 2257 - protein, 7 aa, Artificial Sequence
  Representative cyclic modulating agent based on T-cadherin cell adhesion recognition sequence
DRINENK

SEQ ID NO: 2258 - protein, 8 aa, Artificial Sequence
  Representative cyclic modulating agent based on T-cadherin cell adhesion recognition sequence
DFRINENK

SEQ ID NO: 2259 - protein, 9 aa, Artificial Sequence
  Representative cyclic modulating agent based on T-cadherin cell adhesion recognition sequence
DIFRINENK

SEQ ID NO: 2260 - protein, 5 aa, Artificial Sequence
  Representative cyclic modulating agent based on T-cadherin cell adhesion recognition sequence
ENENK

SEQ ID NO: 2261 - protein, 6 aa, Artificial Sequence
  Representative cyclic modulating agent based on T-cadherin cell adhesion recognition sequence
EINENK

SEQ ID NO: 2262 - protein, 7 aa, Artificial Sequence
  Representative cyclic modulating agent based on T-cadherin cell adhesion recognition sequence
ERINENK

SEQ ID NO: 2263 - protein, 8 aa, Artificial Sequence
  Representative cyclic modulating agent based on T-cadherin cell adhesion recognition sequence
EFRINENK

SEQ ID NO: 2264 - protein, 9 aa, Artificial Sequence
  Representative cyclic modulating agent based on T-cadherin cell adhesion recognition sequence
EIFRINENK

SEQ ID NO: 2265 - protein, 5 aa, Artificial Sequence
  Representative cyclic modulating agent based on T-cadherin cell adhesion recognition sequence
KNEND

SEQ ID NO: 2266 - protein, 6 aa, Artificial Sequence
  Representative cyclic modulating agent based on T-cadherin cell adhesion recognition sequence
KINEND

SEQ ID NO: 2267 - protein, 6 aa, Artificial Sequence
  Representative cyclic modulating agent based on T-cadherin cell adhesion recognition sequence
KNENTD

SEQ ID NO: 2268 - protein, 7 aa, Artificial Sequence
  Representative cyclic modulating agent based on T-cadherin cell adhesion recognition sequence
KRINEND

SEQ ID NO: 2269 - protein, 7 aa, Artificial Sequence
  Representative cyclic modulating agent based on T-cadherin cell adhesion recognition sequence
KINENTD

SEQ ID NO: 2270 - protein, 8 aa, Artificial Sequence
  Representative cyclic modulating agent based on T-cadherin cell adhesion recognition sequence
KRINENTD

SEQ ID NO: 2271 - protein, 7 aa, Artificial Sequence
  Representative cyclic modulating agent based on T-cadherin cell adhesion recognition sequence
KNENTGD

SEQ ID NO: 2272 - protein, 8 aa, Artificial Sequence
  Representative cyclic modulating agent based on T-cadherin cell adhesion recognition sequence
KINENTGD

SEQ ID NO: 2273 - protein, 9 aa, Artificial Sequence
  Representative cyclic modulating agent based on T-cadherin cell adhesion recognition sequence
KRINENTGD

SEQ ID NO: 2274 - protein, 8 aa, Artificial Sequence
  Representative cyclic modulating agent based on T-cadherin cell adhesion recognition sequence
KFRINEND

SEQ ID NO: 2275 - protein, 9 aa, Artificial Sequence
  Representative cyclic modulating agent based on T-cadherin cell adhesion recognition sequence
KFRINENTD

SEQ ID NO: 2276 - protein, 10 aa, Artificial Sequence
  Representative cyclic modulating agent based on T-cadherin cell adhesion recognition sequence
KFRINENTGD

SEQ ID NO: 2277 - protein, 9 aa, Artificial Sequence
  Representative cyclic modulating agent based on T-cadherin cell adhesion recognition sequence
KIFRINEND

SEQ ID NO: 2278 - protein, 10 aa, Artificial Sequence
  Representative cyclic modulating agent based on T-cadherin cell adhesion recognition sequence
KIFRINENTD

SEQ ID NO: 2279 - protein, 11 aa, Artificial Sequence
  Representative cyclic modulating agent based on T-cadherin cell adhesion recognition sequence
KIFRINENTGD

SEQ ID NO: 2280 - protein, 5 aa, Artificial Sequence
  Representative cyclic modulating agent based on T-cadherin cell adhesion recognition sequence
VNENT

SEQ ID NO: 2281 - protein, 5 aa, Artificial Sequence
  Representative cyclic modulating agent based on T-cadherin cell adhesion recognition sequence
INENT

SEQ ID NO: 2282 - protein, 6 aa, Artificial Sequence
  Representative cyclic modulating agent based on T-cadherin cell adhesion recognition sequence
RINENT

SEQ ID NO: 2283 - protein, 5 aa, Artificial Sequence
  Representative cyclic modulating agent based on T-cadherin cell adhesion recognition sequence
NENTG

SEQ ID NO: 2284 - protein, 6 aa, Artificial Sequence
  Representative cyclic modulating agent based on T-cadherin cell adhesion recognition sequence
INENTG

SEQ ID NO: 2285 - protein, 5 aa, Artificial Sequence
  Representative cyclic modulating agent based on T-cadherin cell adhesion recognition sequence
KNENE

SEQ ID NO: 2286 - protein, 6 aa, Artificial Sequence
  Representative cyclic modulating agent based on T-cadherin cell adhesion recognition sequence
KINENE

SEQ ID NO: 2287 - protein, 6 aa, Artificial Sequence
  Representative cyclic modulating agent based on T-cadherin cell adhesion recognition sequence
KNENTE

SEQ ID NO: 2288 - protein, 7 aa, Artificial Sequence
  Representative cyclic modulating agent based on T-cadherin cell adhesion recognition sequence
KRINENE

SEQ ID NO: 2289 - protein, 7 aa, Artificial Sequence
  Representative cyclic modulating agent based on T-cadherin cell adhesion recognition sequence
KINENTE

SEQ ID NO: 2290 - protein, 8 aa, Artificial Sequence
  Representative cyclic modulating agent based on T-cadherin cell adhesion recognition sequence
KRINENTE

SEQ ID NO: 2291 - protein, 7 aa, Artificial Sequence
  Representative cyclic modulating agent based on T-cadherin cell adhesion recognition sequence
KNENTGE

SEQ ID NO: 2292 - protein, 8 aa, Artificial Sequence
  Representative cyclic modulating agent based on T-cadherin cell adhesion recognition sequence
KINENTGE

SEQ ID NO: 2293 - protein, 9 aa, Artificial Sequence
  Representative cyclic modulating agent based on T-cadherin cell adhesion recognition sequence
KRINENTGE

SEQ ID NO: 2294 - protein, 8 aa, Artificial Sequence
  Representative cyclic modulating agent based on T-cadherin cell adhesion recognition sequence
KFRINENE

SEQ ID NO: 2295 - protein, 9 aa, Artificial Sequence
  Representative cyclic modulating agent based on T-cadherin cell adhesion recognition sequence
KFRINENTE

SEQ ID NO: 2296 - protein, 10 aa, Artificial Sequence
  Representative cyclic modulating agent based on T-cadherin cell adhesion recognition sequence
KFRINENTGE

SEQ ID NO: 2297 - protein, 9 aa, Artificial Sequence
  Representative cyclic modulating agent based on T-cadherin cell adhesion recognition sequence
KIFRINENE

SEQ ID NO: 2298 - protein, 10 aa, Artificial Sequence
  Representative cyclic modulating agent based on T-cadherin cell adhesion recognition sequence
KIFRINENTE

SEQ ID NO: 2299 - protein, 11 aa, Artificial Sequence
  Representative cyclic modulating agent based on T-cadherin cell adhesion recognition sequence
KIFRINENTGE

SEQ ID NO: 2300 - protein, 5 aa, Artificial Sequence
  Representative cyclic modulating agent based on PB-cadherin cell adhesion recognition sequence
CEEYC

SEQ ID NO: 2301 - protein, 6 aa, Artificial Sequence
  Representative cyclic modulating agent based on PB-cadherin cell adhesion recognition sequence
CEEYTC

SEQ ID NO: 2302 - protein, 6 aa, Artificial Sequence
  Representative cyclic modulating agent based on PB-cadherin cell adhesion recognition sequence
CEEYTG

SEQ ID NO: 2303 - protein, 6 aa, Artificial Sequence
  Representative cyclic modulating agent based on PB-cadherin cell adhesion recognition sequence
CVEEYC

SEQ ID NO: 2304 - protein, 7 aa, Artificial Sequence
  Representative cyclic modulating agent based on PB-cadherin cell adhesion recognition sequence
CVEEYTC

SEQ ID NO: 2305 - protein, 8 aa, Artificial Sequence
  Representative cyclic modulating agent based on PB-cadherin cell adhesion recognition sequence
CVEEYTGC

SEQ ID NO: 2306 - protein, 7 aa, Artificial Sequence
  Representative cyclic modulating agent based on PB-cadherin cell adhesion recognition sequence
CVVEEYC

SEQ ID NO: 2307 - protein, 8 aa, Artificial Sequence
  Representative cyclic modulating agent based on PB-cadherin cell adhesion recognition sequence
CVVEEYTC

SEQ ID NO: 2308 - protein, 9 aa, Artificial Sequence
  Representative cyclic modulating agent based on PB-cadherin cell adhesion recognition sequence
CVVEEYTGC

SEQ ID NO: 2309 - protein, 8 aa, Artificial Sequence
  Representative cyclic modulating agent based on PB-cadherin cell adhesion recognition sequence
CFVVEEYC

SEQ ID NO: 2310 - protein, 8 aa, Artificial Sequence
  Representative cyclic modulating agent based on PB-cadherin cell adhesion recognition sequence
CFVEEYTC

SEQ ID NO: 2311 - protein, 9 aa, Artificial Sequence
  Representative cyclic modulating agent based on PB-cadherin cell adhesion recognition sequence
CFVEEYTGC

SEQ ID NO: 2312 - protein, 9 aa, Artificial Sequence
  Representative cyclic modulating agent based on PB-cadherin cell adhesion recognition sequence
CFFVVEEYC

SEQ ID NO: 2313 - protein, 10 aa, Artificial Sequence
  Representative cyclic modulating agent based on PB-cadherin cell adhesion recognition sequence
CFFVVEEYTC

SEQ ID NO: 2314 - protein, 11 aa, Artificial Sequence
  Representative cyclic modulating agent based on PB-cadherin cell adhesion recognition sequence
CFFVVEEYTGC

SEQ ID NO: 2315 - protein, 7 aa, Artificial Sequence
  Representative cyclic modulating agent based on PB-cadherin cell adhesion recognition sequence
CLIDELC

SEQ ID NO: 2316 - protein, 8 aa, Artificial Sequence
  Representative cyclic modulating agent based on PB-cadherin cell adhesion recognition sequence
CLIDELTC

SEQ ID NO: 2317 - protein, 9 aa, Artificial Sequence
  Representative cyclic modulating agent based on PB-cadherin cell adhesion recognition sequence
CLIDELTGC

SEQ ID NO: 2318 - protein, 8 aa, Artificial Sequence
  Representative cyclic modulating agent based on PB-cadherin cell adhesion recognition sequence
CFLIDELC

SEQ ID NO: 2319 - protein, 9 aa, Artificial Sequence
  Representative cyclic modulating agent based on PB-cadherin cell adhesion recognition sequence
CFLIDELTC

SEQ ID NO: 2320 - protein, 10 aa, Artificial Sequence
  Representative cyclic modulating agent based on PB-cadherin cell adhesion recognition sequence
CFLIDELTGC

SEQ ID NO: 2321 - protein, 9 aa, Artificial Sequence
  Representative cyclic modulating agent based on PB-cadherin cell adhesion recognition sequence
CIFLIDELC

SEQ ID NO: 2322 - protein, 10 aa, Artificial Sequence
  Representative cyclic modulating agent based on PB-cadherin cell adhesion recognition sequence
CIFLIDELTC

SEQ ID NO: 2323 - protein, 11 aa, Artificial Sequence
  Representative cyclic modulating agent based on PB-cadherin cell adhesion recognition sequence
CIFLIDELTGC

SEQ ID NO: 2324 - protein, 7 aa, Artificial Sequence
  Representative cyclic modulating agent based on PB-cadherin cell adhesion recognition sequence
CTVDPKC

SEQ ID NO: 2325 - protein, 8 aa, Artificial Sequence
  Representative cyclic modulating agent based on PB-cadherin cell adhesion recognition sequence
CTVDPKTC

SEQ ID NO: 2326 - protein, 9 aa, Artificial Sequence
  Representative cyclic modulating agent based on PB-cadherin cell adhesion recognition sequence
CTVDPKTGC

SEQ ID NO: 2327 - protein, 8 aa, Artificial Sequence
  Representative cyclic modulating agent based on PB-cadherin cell adhesion recognition sequence
CFTVDPKC

SEQ ID NO: 2328 - protein, 9 aa, Artificial Sequence
  Representative cyclic modulating agent based on PB-cadherin cell adhesion recognition sequence
CFTVDPKTC

SEQ ID NO: 2329 - protein, 10 aa, Artificial Sequence
  Representative cyclic modulating agent based on PB-cadherin cell adhesion recognition sequence
CFTVDPKTGC

SEQ ID NO: 2330 - protein, 9 aa, Artificial Sequence
  Representative cyclic modulating agent based on PB-cadherin cell adhesion recognition sequence
CHFTVDPKC

SEQ ID NO: 2331 - protein, 10 aa, Artificial Sequence
  Representative cyclic modulating agent based on PB-cadherin cell adhesion recognition sequence
CHFTVDPKTC

SEQ ID NO: 2332 - protein, 11 aa, Artificial Sequence
  Representative cyclic modulating agent based on PB-cadherin cell adhesion recognition sequence
CHFTVDPKTGC

SEQ ID NO: 2333 - protein, 5 aa, Artificial Sequence
  Representative cyclic modulating agent based on PB-cadherin cell adhesion recognition sequence
CDADC

SEQ ID NO: 2334 - protein, 6 aa, Artificial Sequence
  Representative cyclic modulating agent based on PB-cadherin cell adhesion recognition sequence
CDADTC

SEQ ID NO: 2335 - protein, 7 aa, Artificial Sequence
  Representative cyclic modulating agent based on PB-cadherin cell adhesion recognition sequence
CDADTGC

SEQ ID NO: 2336 - protein, 6 aa, Artificial Sequence
  Representative cyclic modulating agent based on PB-cadherin cell adhesion recognition sequence
CIDADC

SEQ ID NO: 2337 - protein, 7 aa, Artificial Sequence
  Representative cyclic modulating agent based on PB-cadherin cell adhesion recognition sequence
CIDADTC

SEQ ID NO: 2338 - protein, 8 aa, Artificial Sequence
  Representative cyclic modulating agent based on PB-cadherin cell adhesion recognition sequence
CIDADTGC

SEQ ID NO: 2339 - protein, 7 aa, Artificial Sequence
  Representative cyclic modulating agent based on PB-cadherin cell adhesion recognition sequence
CDIDADC

SEQ ID NO: 2340 - protein, 8 aa, Artificial Sequence
  Representative cyclic modulating agent based on PB-cadherin cell adhesion recognition sequence
CDIDADTC

SEQ ID NO: 2341 - protein, 9 aa, Artificial Sequence
  Representative cyclic modulating agent based on PB-cadherin cell adhesion recognition sequence
CDIDADTGC

SEQ ID NO: 2342 - protein, 8 aa, Artificial Sequence
  Representative cyclic modulating agent based on PB-cadherin cell adhesion recognition sequence
CFDIDADC

SEQ ID NO: 2343 - protein, 9 aa, Artificial Sequence
  Representative cyclic modulating agent based on PB-cadherin cell adhesion recognition sequence
CFDIDADTC

SEQ ID NO: 2344 - protein, 10 aa, Artificial Sequence
  Representative cyclic modulating agent based on PB-cadherin cell adhesion recognition sequence
CFDIDADTGC

SEQ ID NO: 2345 - protein, 9 aa, Artificial Sequence
  Representative cyclic modulating agent based on PB-cadherin cell adhesion recognition sequence
CIFDIDADC

SEQ ID NO: 2346 - protein, 10 aa, Artificial Sequence
  Representative cyclic modulating agent based on PB-cadherin cell adhesion recognition sequence
CIFDIDADTC

SEQ ID NO: 2347 - protein, 11 aa, Artificial Sequence
  Representative cyclic modulating agent based on PB-cadherin cell adhesion recognition sequence
CIFDIDADTGC

SEQ ID NO: 2348 - protein, 5 aa, Artificial Sequence
  Representative cyclic modulating agent based on PB-cadherin cell adhesion recognition sequence
EEEYK

SEQ ID NO: 2349 - protein, 6 aa, Artificial Sequence
  Representative cyclic modulating agent based on PB-cadherin cell adhesion recognition sequence
EEEYTK

SEQ ID NO: 2350 - protein, 7 aa, Artificial Sequence
  Representative cyclic modulating agent based on PB-cadherin cell adhesion recognition sequence
EEEYTGK

SEQ ID NO: 2351 - protein, 6 aa, Artificial Sequence
  Representative cyclic modulating agent based on PB-cadherin cell adhesion recognition sequence
EVEEYK

SEQ ID NO: 2352 - protein, 7 aa, Artificial Sequence
  Representative cyclic modulating agent based on PB-cadherin cell adhesion recognition sequence
EVEEYTK

SEQ ID NO: 2353 - protein, 8 aa, Artificial Sequence
  Representative cyclic modulating agent based on PB-cadherin cell adhesion recognition sequence
EVEEYTGK

SEQ ID NO: 2354 - protein, 7 aa, Artificial Sequence
  Representative cyclic modulating agent based on PB-cadherin cell adhesion recognition sequence
EVVEEYK

SEQ ID NO: 2355 - protein, 8 aa, Artificial Sequence
  Representative cyclic modulating agent based on PB-cadherin cell adhesion recognition sequence
EVVEEYTK

SEQ ID NO: 2356 - protein, 9 aa, Artificial Sequence
  Representative cyclic modulating agent based on PB-cadherin cell adhesion recognition sequence
EVVEEYTGK

SEQ ID NO: 2357 - protein, 8 aa, Artificial Sequence
  Representative cyclic modulating agent based on PB-cadherin cell adhesion recognition sequence
EFVVEEYK

SEQ ID NO: 2358 - protein, 8 aa, Artificial Sequence
  Representative cyclic modulating agent based on PB-cadherin cell adhesion recognition sequence
EFVEEYTK

SEQ ID NO: 2359 - protein, 9 aa, Artificial Sequence
  Representative cyclic modulating agent based on PB-cadherin cell adhesion recognition sequence
EFVEEYTGK

SEQ ID NO: 2360 - protein, 9 aa, Artificial Sequence
  Representative cyclic modulating agent based on PB-cadherin cell adhesion recognition sequence
EFFVVEEYK

SEQ ID NO: 2361 - protein, 10 aa, Artificial Sequence
  Representative cyclic modulating agent based on PB-cadherin cell adhesion recognition sequence
EFFVVEEYTK

SEQ ID NO: 2362 - protein, 11 aa, Artificial Sequence
  Representative cyclic modulating agent based on PB-cadherin cell adhesion recognition sequence
EFFVVEEYTGK

SEQ ID NO: 2363 - protein, 5 aa, Artificial Sequence
  Representative cyclic modulating agent based on PB-cadherin cell adhesion recognition sequence
EDELK

SEQ ID NO: 2364 - protein, 6 aa, Artificial Sequence
  Representative cyclic modulating agent based on PB-cadherin cell adhesion recognition sequence
EDELTK

SEQ ID NO: 2365 - protein, 7 aa, Artificial Sequence
  Representative cyclic modulating agent based on PB-cadherin cell adhesion recognition sequence
EDELTGK

SEQ ID NO: 2366 - protein, 6 aa, Artificial Sequence
  Representative cyclic modulating agent based on PB-cadherin cell adhesion recognition sequence
EIDELK

SEQ ID NO: 2367 - protein, 7 aa, Artificial Sequence
  Representative cyclic modulating agent based on PB-cadherin cell adhesion recognition sequence
EIDELTK

SEQ ID NO: 2368 - protein, 8 aa, Artificial Sequence
  Representative cyclic modulating agent based on PB-cadherin cell adhesion recognition sequence
EIDELTGK

SEQ ID NO: 2369 - protein, 7 aa, Artificial Sequence
  Representative cyclic modulating agent based on PB-cadherin cell adhesion recognition sequence
ELIDELK

SEQ ID NO: 2370 - protein, 8 aa, Artificial Sequence
  Representative cyclic modulating agent based on PB-cadherin cell adhesion recognition sequence
ELIDELTK

SEQ ID NO: 2371 - protein, 9 aa, Artificial Sequence
  Representative cyclic modulating agent based on PB-cadherin cell adhesion recognition sequence
ELIDELTGK

SEQ ID NO: 2372 - protein, 8 aa, Artificial Sequence
  Representative cyclic modulating agent based on PB-cadherin cell adhesion recognition sequence
EFLIDELK

SEQ ID NO: 2373 - protein, 9 aa, Artificial Sequence
  Representative cyclic modulating agent based on PB-cadherin cell adhesion recognition sequence
EFLIDELTK

SEQ ID NO: 2374 - protein, 10 aa, Artificial Sequence
  Representative cyclic modulating agent based on PB-cadherin cell adhesion recognition sequence
EFLIDELTGK

SEQ ID NO: 2375 - protein, 9 aa, Artificial Sequence
  Representative cyclic modulating agent based on PB-cadherin cell adhesion recognition sequence
EIFLIDELK

SEQ ID NO: 2376 - protein, 10 aa, Artificial Sequence
  Representative cyclic modulating agent based on PB-cadherin cell adhesion recognition sequence
EIFLIDELTK

SEQ ID NO: 2377 - protein, 11 aa, Artificial Sequence
  Representative cyclic modulating agent based on PB-cadherin cell adhesion recognition sequence
EIFLIDELTGK

SEQ ID NO: 2378 - protein, 5 aa, Artificial Sequence
  Representative cyclic modulating agent based on PB-cadherin cell adhesion recognition sequence
EDPKK

SEQ ID NO: 2379 - protein, 6 aa, Artificial Sequence
  Representative cyclic modulating agent based on PB-cadherin cell adhesion recognition sequence
EDPKTK

SEQ ID NO: 2380 - protein, 7 aa, Artificial Sequence
  Representative cyclic modulating agent based on PB-cadherin cell adhesion recognition sequence
EDPKTGK

SEQ ID NO: 2381 - protein, 6 aa, Artificial Sequence
  Representative cyclic modulating agent based on PB-cadherin cell adhesion recognition sequence
EVDPKK

SEQ ID NO: 2382 - protein, 7 aa, Artificial Sequence
  Representative cyclic modulating agent based on PB-cadherin cell adhesion recognition sequence
EVDPKTK

SEQ ID NO: 2383 - protein, 8 aa, Artificial Sequence
  Representative cyclic modulating agent based on PB-cadherin cell adhesion recognition sequence
EVDPKTGK

SEQ ID NO: 2384 - protein, 7 aa, Artificial Sequence
  Representative cyclic modulating agent based on PB-cadherin cell adhesion recognition sequence
ETVDPKK

SEQ ID NO: 2385 - protein, 8 aa, Artificial Sequence
  Representative cyclic modulating agent based on PB-cadherin cell adhesion recognition sequence
ETVDPKTK

SEQ ID NO: 2386 - protein, 9 aa, Artificial Sequence
  Representative cyclic modulating agent based on PB-cadherin cell adhesion recognition sequence
ETVDPKTGK

SEQ ID NO: 2387 - protein, 8 aa, Artificial Sequence
  Representative cyclic modulating agent based on PB-cadherin cell adhesion recognition sequence
EFTVDPKK

SEQ ID NO: 2388 - protein, 9 aa, Artificial Sequence
  Representative cyclic modulating agent based on PB-cadherin cell adhesion recognition sequence
EFTVDPKTK

SEQ ID NO: 2389 - protein, 10 aa, Artificial Sequence
  Representative cyclic modulating agent based on PB-cadherin cell adhesion recognition sequence
EFTVDPKTGK

SEQ ID NO: 2390 - protein, 9 aa, Artificial Sequence
  Representative cyclic modulating agent based on PB-cadherin cell adhesion recognition sequence
EHFTVDPKK

SEQ ID NO: 2391 - protein, 10 aa, Artificial Sequence
  Representative cyclic modulating agent based on PB-cadherin cell adhesion recognition sequence
EHFTVDPKTK

SEQ ID NO: 2392 - protein, 11 aa, Artificial Sequence
  Representative cyclic modulating agent based on PB-cadherin cell adhesion recognition sequence
EHFTVDPKTGK

SEQ ID NO: 2393 - protein, 5 aa, Artificial Sequence
  Representative cyclic modulating agent based on PB-cadherin cell adhesion recognition sequence
EDADK

SEQ ID NO: 2394 - protein, 6 aa, Artificial Sequence
  Representative cyclic modulating agent based on PB-cadherin cell adhesion recognition sequence
EDADTK

SEQ ID NO: 2395 - protein, 7 aa, Artificial Sequence
  Representative cyclic modulating agent based on PB-cadherin cell adhesion recognition sequence
EDADTGK

SEQ ID NO: 2396 - protein, 6 aa, Artificial Sequence
  Representative cyclic modulating agent based on PB-cadherin cell adhesion recognition sequence
EIDADK

SEQ ID NO: 2397 - protein, 7 aa, Artificial Sequence
  Representative cyclic modulating agent based on PB-cadherin cell adhesion recognition sequence
EIDADTK

SEQ ID NO: 2398 - protein, 8 aa, Artificial Sequence
  Representative cyclic modulating agent based on PB-cadherin cell adhesion recognition sequence
EIDADTGK

SEQ ID NO: 2399 - protein, 7 aa, Artificial Sequence
  Representative cyclic modulating agent based on PB-cadherin cell adhesion recognition sequence
EDIDADK

SEQ ID NO: 2400 - protein, 8 aa, Artificial Sequence
  Representative cyclic modulating agent based on PB-cadherin cell adhesion recognition sequence
EDIDADTK

SEQ ID NO: 2401 - protein, 9 aa, Artificial Sequence
  Representative cyclic modulating agent based on PB-cadherin cell adhesion recognition sequence
EDIDADTGK

SEQ ID NO: 2402 - protein, 8 aa, Artificial Sequence
  Representative cyclic modulating agent based on PB-cadherin cell adhesion recognition sequence
EFDIDADK

SEQ ID NO: 2403 - protein, 9 aa, Artificial Sequence
  Representative cyclic modulating agent based on PB-cadherin cell adhesion recognition sequence
EFDIDADTK

SEQ ID NO: 2404 - protein, 10 aa, Artificial Sequence
  Representative cyclic modulating agent based on PB-cadherin cell adhesion recognition sequence
EFDIDADTGK

SEQ ID NO: 2405 - protein, 9 aa, Artificial Sequence
  Representative cyclic modulating agent based on PB-cadherin cell adhesion recognition sequence
EIFDIDADK

SEQ ID NO: 2406 - protein, 10 aa, Artificial Sequence
  Representative cyclic modulating agent based on PB-cadherin cell adhesion recognition sequence
EIFDIDADTK

SEQ ID NO: 2407 - protein, 11 aa, Artificial Sequence
  Representative cyclic modulating agent based on PB-cadherin cell adhesion recognition sequence
EIFDIDADTGK

SEQ ID NO: 2408 - protein, 5 aa, Artificial Sequence
  Representative cyclic modulating agent based on PB-cadherin cell adhesion recognition sequence
KEEYD

SEQ ID NO: 2409 - protein, 6 aa, Artificial Sequence
  Representative cyclic modulating agent based on PB-cadherin cell adhesion recognition sequence
KEEYTD

SEQ ID NO: 2410 - protein, 7 aa, Artificial Sequence
  Representative cyclic modulating agent based on PB-cadherin cell adhesion recognition sequence
KEEYTGD

SEQ ID NO: 2411 - protein, 6 aa, Artificial Sequence
  Representative cyclic modulating agent based on PB-cadherin cell adhesion recognition sequence
KVEEYD

SEQ ID NO: 2412 - protein, 7 aa, Artificial Sequence
  Representative cyclic modulating agent based on PB-cadherin cell adhesion recognition sequence
KVEEYTD

SEQ ID NO: 2413 - protein, 8 aa, Artificial Sequence
  Representative cyclic modulating agent based on PB-cadherin cell adhesion recognition sequence
KVEEYTGD

SEQ ID NO: 2414 - protein, 7 aa, Artificial Sequence
  Representative cyclic modulating agent based on PB-cadherin cell adhesion recognition sequence
KVVEEYD

SEQ ID NO: 2415 - protein, 8 aa, Artificial Sequence
  Representative cyclic modulating agent based on PB-cadherin cell adhesion recognition sequence
KVVEEYTD

SEQ ID NO: 2416 - protein, 9 aa, Artificial Sequence
  Representative cyclic modulating agent based on PB-cadherin cell adhesion recognition sequence
KVVEEYTGD

SEQ ID NO: 2417 - protein, 8 aa, Artificial Sequence
  Representative cyclic modulating agent based on PB-cadherin cell adhesion recognition sequence
KFVVEEYD

SEQ ID NO: 2418 - protein, 8 aa, Artificial Sequence
  Representative cyclic modulating agent based on PB-cadherin cell adhesion recognition sequence
KFVEEYTD

SEQ ID NO: 2419 - protein, 9 aa, Artificial Sequence
  Representative cyclic modulating agent based on PB-cadherin cell adhesion recognition sequence
KFVEEYTGD

SEQ ID NO: 2420 - protein, 9 aa, Artificial Sequence
  Representative cyclic modulating agent based on PB-cadherin cell adhesion recognition sequence
KFFVVEEYD

SEQ ID NO: 2421 - protein, 10 aa, Artificial Sequence
  Representative cyclic modulating agent based on PB-cadherin cell adhesion recognition sequence
KFFVVEEYTD

SEQ ID NO: 2422 - protein, 11 aa, Artificial Sequence
  Representative cyclic modulating agent based on PB-cadherin cell adhesion recognition sequence
KFFVVEEYTGD

SEQ ID NO: 2423 - protein, 5 aa, Artificial Sequence
  Representative cyclic modulating agent based on PB-cadherin cell adhesion recognition sequence
KDELD

SEQ ID NO: 2424 - protein, 6 aa, Artificial Sequence
  Representative cyclic modulating agent based on PB-cadherin cell adhesion recognition sequence
KDELTD

SEQ ID NO: 2425 - protein, 7 aa, Artificial Sequence
  Representative cyclic modulating agent based on PB-cadherin cell adhesion recognition sequence
KDELTGD

SEQ ID NO: 2426 - protein, 6 aa, Artificial Sequence
  Representative cyclic modulating agent based on PB-cadherin cell adhesion recognition sequence
KIDELD

SEQ ID NO: 2427 - protein, 7 aa, Artificial Sequence
  Representative cyclic modulating agent based on PB-cadherin cell adhesion recognition sequence
KIDELTD

SEQ ID NO: 2428 - protein, 8 aa, Artificial Sequence
  Representative cyclic modulating agent based on PB-cadherin cell adhesion recognition sequence
KIDELTGD

SEQ ID NO: 2429 - protein, 7 aa, Artificial Sequence
  Representative cyclic modulating agent based on PB-cadherin cell adhesion recognition sequence
KLIDELD

SEQ ID NO: 2430 - protein, 8 aa, Artificial Sequence
  Representative cyclic modulating agent based on PB-cadherin cell adhesion recognition sequence
KLIDELTD

SEQ ID NO: 2431 - protein, 9 aa, Artificial Sequence
  Representative cyclic modulating agent based on PB-cadherin cell adhesion recognition sequence
KLIDELTGD

SEQ ID NO: 2432 - protein, 8 aa, Artificial Sequence
  Representative cyclic modulating agent based on PB-cadherin cell adhesion recognition sequence
KFLIDELD

SEQ ID NO: 2433 - protein, 9 aa, Artificial Sequence
  Representative cyclic modulating agent based on PB-cadherin cell adhesion recognition sequence
KFLIDELTD

SEQ ID NO: 2434 - protein, 10 aa, Artificial Sequence
  Representative cyclic modulating agent based on PB-cadherin cell adhesion recognition sequence
KFLIDELTGD

SEQ ID NO: 2435 - protein, 9 aa, Artificial Sequence
  Representative cyclic modulating agent based on PB-cadherin cell adhesion recognition sequence
KIFLIDELD

SEQ ID NO: 2436 - protein, 10 aa, Artificial Sequence
  Representative cyclic modulating agent based on PB-cadherin cell adhesion recognition sequence
KIFLIDELTD

SEQ ID NO: 2437 - protein, 11 aa, Artificial Sequence
  Representative cyclic modulating agent based on PB-cadherin cell adhesion recognition sequence
KIFLIDELTGD

SEQ ID NO: 2438 - protein, 5 aa, Artificial Sequence
  Representative cyclic modulating agent based on PB-cadherin cell adhesion recognition sequence
KDPKD

SEQ ID NO: 2439 - protein, 6 aa, Artificial Sequence
  Representative cyclic modulating agent based on PB-cadherin cell adhesion recognition sequence
KDPKTD

SEQ ID NO: 2440 - protein, 7 aa, Artificial Sequence
  Representative cyclic modulating agent based on PB-cadherin cell adhesion recognition sequence
KDPKTGD

SEQ ID NO: 2441 - protein, 6 aa, Artificial Sequence
  Representative cyclic modulating agent based on PB-cadherin cell adhesion recognition sequence
KVDPKD

SEQ ID NO: 2442 - protein, 7 aa, Artificial Sequence
  Representative cyclic modulating agent based on PB-cadherin cell adhesion recognition sequence
KVDPKTD

SEQ ID NO: 2443 - protein, 8 aa, Artificial Sequence
  Representative cyclic modulating agent based on PB-cadherin cell adhesion recognition sequence
KVDPKTGD

SEQ ID NO: 2444 - protein, 7 aa, Artificial Sequence
  Representative cyclic modulating agent based on PB-cadherin cell adhesion recognition sequence
KTVDPKD

SEQ ID NO: 2445 - protein, 8 aa, Artificial Sequence
  Representative cyclic modulating agent based on PB-cadherin cell adhesion recognition sequence
KTVDPKTD

SEQ ID NO: 2446 - protein, 9 aa, Artificial Sequence
  Representative cyclic modulating agent based on PB-cadherin cell adhesion recognition sequence
KTVDPKTGD

SEQ ID NO: 2447 - protein, 8 aa, Artificial Sequence
  Representative cyclic modulating agent based on PB-cadherin cell adhesion recognition sequence
KFTVDPKD

SEQ ID NO: 2448 - protein, 9 aa, Artificial Sequence
  Representative cyclic modulating agent based on PB-cadherin cell adhesion recognition sequence
KFTVDPKTD

SEQ ID NO: 2449 - protein, 10 aa, Artificial Sequence
  Representative cyclic modulating agent based on PB-cadherin cell adhesion recognition sequence
KFTVDPKTGD

SEQ ID NO: 2450 - protein, 9 aa, Artificial Sequence
  Representative cyclic modulating agent based on PB-cadherin cell adhesion recognition sequence
KHFTVDPKD

SEQ ID NO: 2451 - protein, 10 aa, Artificial Sequence
  Representative cyclic modulating agent based on PB-cadherin cell adhesion recognition sequence
KHFTVDPKTD

SEQ ID NO: 2452 - protein, 11 aa, Artificial Sequence
  Representative cyclic modulating agent based on PB-cadherin cell adhesion recognition sequence
KHFTVDPKTGD

SEQ ID NO: 2453 - protein, 5 aa, Artificial Sequence
  Representative cyclic modulating agent based on PB-cadherin cell adhesion recognition sequence
KDADD

SEQ ID NO: 2454 - protein, 6 aa, Artificial Sequence
  Representative cyclic modulating agent based on PB-cadherin cell adhesion recognition sequence
KDADTD

SEQ ID NO: 2455 - protein, 7 aa, Artificial Sequence
  Representative cyclic modulating agent based on PB-cadherin cell adhesion recognition sequence
KDADTGD

SEQ ID NO: 2456 - protein, 6 aa, Artificial Sequence
  Representative cyclic modulating agent based on PB-cadherin cell adhesion recognition sequence
KIDADD

SEQ ID NO: 2457 - protein, 7 aa, Artificial Sequence
  Representative cyclic modulating agent based on PB-cadherin cell adhesion recognition sequence
KIDADTD

SEQ ID NO: 2458 - protein, 8 aa, Artificial Sequence
  Representative cyclic modulating agent based on PB-cadherin cell adhesion recognition sequence
KIDADTGD

SEQ ID NO: 2459 - protein, 7 aa, Artificial Sequence
  Representative cyclic modulating agent based on PB-cadherin cell adhesion recognition sequence
KDIDADD

SEQ ID NO: 2460 - protein, 8 aa, Artificial Sequence
  Representative cyclic modulating agent based on PB-cadherin cell adhesion recognition sequence
KDIDADTD

SEQ ID NO: 2461 - protein, 9 aa, Artificial Sequence
  Representative cyclic modulating agent based on PB-cadherin cell adhesion recognition sequence
KDIDADTGD

SEQ ID NO: 2462 - protein, 8 aa, Artificial Sequence
  Representative cyclic modulating agent based on PB-cadherin cell adhesion recognition sequence
KFDIDADD

SEQ ID NO: 2463 - protein, 9 aa, Artificial Sequence
  Representative cyclic modulating agent based on PB-cadherin cell adhesion recognition sequence
KFDIDADTD

SEQ ID NO: 2464 - protein, 10 aa, Artificial Sequence
  Representative cyclic modulating agent based on PB-cadherin cell adhesion recognition sequence
KFDIDADTGD

SEQ ID NO: 2465 - protein, 9 aa, Artificial Sequence
  Representative cyclic modulating agent based on PB-cadherin cell adhesion recognition sequence
KIFDIDADD

SEQ ID NO: 2466 - protein, 10 aa, Artificial Sequence
  Representative cyclic modulating agent based on PB-cadherin cell adhesion recognition sequence
KIFDIDADTD

SEQ ID NO: 2467 - protein, 11 aa, Artificial Sequence
  Representative cyclic modulating agent based on PB-cadherin cell adhesion recognition sequence
KIFDIDADTGD

SEQ ID NO: 2468 - protein, 5 aa, Artificial Sequence
  Representative cyclic modulating agent based on PB-cadherin cell adhesion recognition sequence
DEEYK

SEQ ID NO: 2469 - protein, 6 aa, Artificial Sequence
  Representative cyclic modulating agent based on PB-cadherin cell adhesion recognition sequence
DEEYTK

SEQ ID NO: 2470 - protein, 7 aa, Artificial Sequence
  Representative cyclic modulating agent based on PB-cadherin cell adhesion recognition sequence
DEEYTGK

SEQ ID NO: 2471 - protein, 6 aa, Artificial Sequence
  Representative cyclic modulating agent based on PB-cadherin cell adhesion recognition sequence
DVEEYK

SEQ ID NO: 2472 - protein, 7 aa, Artificial Sequence
  Representative cyclic modulating agent based on PB-cadherin cell adhesion recognition sequence
DVEEYTK

SEQ ID NO: 2473 - protein, 8 aa, Artificial Sequence
  Representative cyclic modulating agent based on PB-cadherin cell adhesion recognition sequence
DVEEYTGK

SEQ ID NO: 2474 - protein, 7 aa, Artificial Sequence
  Representative cyclic modulating agent based on PB-cadherin cell adhesion recognition sequence
DVVEEYK

SEQ ID NO: 2475 - protein, 8 aa, Artificial Sequence
  Representative cyclic modulating agent based on PB-cadherin cell adhesion recognition sequence
DVVEEYTK

SEQ ID NO: 2476 - protein, 9 aa, Artificial Sequence
  Representative cyclic modulating agent based on PB-cadherin cell adhesion recognition sequence
DVVEEYTGK

SEQ ID NO: 2477 - protein, 8 aa, Artificial Sequence
  Representative cyclic modulating agent based on PB-cadherin cell adhesion recognition sequence
DFVVEEYK

SEQ ID NO: 2478 - protein, 8 aa, Artificial Sequence
  Representative cyclic modulating agent based on PB-cadherin cell adhesion recognition sequence
DFVEEYTK

SEQ ID NO: 2479 - protein, 9 aa, Artificial Sequence
  Representative cyclic modulating agent based on PB-cadherin cell adhesion recognition sequence
DFVEEYTGK

SEQ ID NO: 2480 - protein, 9 aa, Artificial Sequence
  Representative cyclic modulating agent based on PB-cadherin cell adhesion recognition sequence
DFFVVEEYK

SEQ ID NO: 2481 - protein, 10 aa, Artificial Sequence
  Representative cyclic modulating agent based on PB-cadherin cell adhesion recognition sequence
DFFVVEEYTK

SEQ ID NO: 2482 - protein, 11 aa, Artificial Sequence
  Representative cyclic modulating agent based on PB-cadherin cell adhesion recognition sequence
DFFVVEEYTGK

SEQ ID NO: 2483 - protein, 5 aa, Artificial Sequence
  Representative cyclic modulating agent based on PB-cadherin cell adhesion recognition sequence
DDELK

SEQ ID NO: 2484 - protein, 6 aa, Artificial Sequence
  Representative cyclic modulating agent based on PB-cadherin cell adhesion recognition sequence
DDELTK

SEQ ID NO: 2485 - protein, 7 aa, Artificial Sequence
  Representative cyclic modulating agent based on PB-cadherin cell adhesion recognition sequence
DDELTGK

SEQ ID NO: 2486 - protein, 6 aa, Artificial Sequence
  Representative cyclic modulating agent based on PB-cadherin cell adhesion recognition sequence
DIDELK

SEQ ID NO: 2487 - protein, 7 aa, Artificial Sequence
  Representative cyclic modulating agent based on PB-cadherin cell adhesion recognition sequence
DIDELTK

SEQ ID NO: 2488 - protein, 8 aa, Artificial Sequence
  Representative cyclic modulating agent based on PB-cadherin cell adhesion recognition sequence
DIDELTGK

SEQ ID NO: 2489 - protein, 7 aa, Artificial Sequence
  Representative cyclic modulating agent based on PB-cadherin cell adhesion recognition sequence
DLIDELK

SEQ ID NO: 2490 - protein, 8 aa, Artificial Sequence
  Representative cyclic modulating agent based on PB-cadherin cell adhesion recognition sequence
DLIDELTK

SEQ ID NO: 2491 - protein, 9 aa, Artificial Sequence
  Representative cyclic modulating agent based on PB-cadherin cell adhesion recognition sequence
DLIDELTGK

SEQ ID NO: 2492 - protein, 8 aa, Artificial Sequence
  Representative cyclic modulating agent based on PB-cadherin cell adhesion recognition sequence
DFLIDELK

SEQ ID NO: 2493 - protein, 9 aa, Artificial Sequence
  Representative cyclic modulating agent based on PB-cadherin cell adhesion recognition sequence
DFLIDELTK

SEQ ID NO: 2494 - protein, 10 aa, Artificial Sequence
  Representative cyclic modulating agent based on PB-cadherin cell adhesion recognition sequence
DFLIDELTGK

SEQ ID NO: 2495 - protein, 9 aa, Artificial Sequence
  Representative cyclic modulating agent based on PB-cadherin cell adhesion recognition sequence
DIFLIDELK

SEQ ID NO: 2496 - protein, 10 aa, Artificial Sequence
  Representative cyclic modulating agent based on PB-cadherin cell adhesion recognition sequence
DIFLIDELTK

SEQ ID NO: 2497 - protein, 11 aa, Artificial Sequence
  Representative cyclic modulating agent based on PB-cadherin cell adhesion recognition sequence
DIFLIDELTGK

SEQ ID NO: 2498 - protein, 5 aa, Artificial Sequence
  Representative cyclic modulating agent based on PB-cadherin cell adhesion recognition sequence
DDPKK

SEQ ID NO: 2499 - protein, 6 aa, Artificial Sequence
  Representative cyclic modulating agent based on PB-cadherin cell adhesion recognition sequence
DDPKTK

SEQ ID NO: 2500 - protein, 7 aa, Artificial Sequence
  Representative cyclic modulating agent based on PB-cadherin cell adhesion recognition sequence
DDPKTGK

SEQ ID NO: 2501 - protein, 6 aa, Artificial Sequence
  Representative cyclic modulating agent based on PB-cadherin cell adhesion recognition sequence
DVDPKK

SEQ ID NO: 2502 - protein, 7 aa, Artificial Sequence
  Representative cyclic modulating agent based on PB-cadherin cell adhesion recognition sequence
DVDPKYK

SEQ ID NO: 2503 - protein, 8 aa, Artificial Sequence
  Representative cyclic modulating agent based on PB-cadherin cell adhesion recognition sequence
DVTPKTGK

SEQ ID NO: 2504 - protein, 7 aa, Artificial Sequence
  Representative cyclic modulating agent based on PB-cadherin cell adhesion recognition sequence
DTVDPKK

SEQ ID NO: 2505 - protein, 8 aa, Artificial Sequence
  Representative cyclic modulating agent based on PB-cadherin cell adhesion recognition sequence
DTVDPKTK

SEQ ID NO: 2506 - protein, 9 aa, Artificial Sequence
  Representative cyclic modulating agent based on PB-cadherin cell adhesion recognition sequence
DTVDPKTGK

SEQ ID NO: 2507 - protein, 8 aa, Artificial Sequence
  Representative cyclic modulating agent based on PB-cadherin cell adhesion recognition sequence
DFTVDPKK

SEQ ID NO: 2508 - protein, 9 aa, Artificial Sequence
  Representative cyclic modulating agent based on PB-cadherin cell adhesion recognition sequence
DFTVDPKTK

SEQ ID NO: 2509 - protein, 10 aa, Artificial Sequence
  Representative cyclic modulating agent based on PB-cadherin cell adhesion recognition sequence
DFTVDPKTGK

SEQ ID NO: 2510 - protein, 9 aa, Artificial Sequence
  Representative cyclic modulating agent based on PB-cadherin cell adhesion recognition sequence
DHFTVDPKK

SEQ ID NO: 2511 - protein, 10 aa, Artificial Sequence
  Representative cyclic modulating agent based on PB-cadherin cell adhesion recognition sequence
DHFTVDPKTK

SEQ ID NO: 2512 - protein, 11 aa, Artificial Sequence
  Representative cyclic modulating agent based on PB-cadherin cell adhesion recognition sequence
DHFTVDPKTGK

SEQ ID NO: 2513 - protein, 5 aa, Artificial Sequence
  Representative cyclic modulating agent based on PB-cadherin cell adhesion recognition sequence
DDADK

SEQ ID NO: 2514 - protein, 6 aa, Artificial Sequence
  Representative cyclic modulating agent based on PB-cadherin cell adhesion recognition sequence
DDADTK

SEQ ID NO: 2515 - protein, 7 aa, Artificial Sequence
  Representative cyclic modulating agent based on PB-cadherin cell adhesion recognition sequence
DDADTGK

SEQ ID NO: 2516 - protein, 6 aa, Artificial Sequence
  Representative cyclic modulating agent based on PB-cadherin cell adhesion recognition sequence
DIDADK

SEQ ID NO: 2517 - protein, 7 aa, Artificial Sequence
  Representative cyclic modulating agent based on PB-cadherin cell adhesion recognition sequence
DIDADTK

SEQ ID NO: 2518 - protein, 8 aa, Artificial Sequence
  Representative cyclic modulating agent based on PB-cadherin cell adhesion recognition sequence
DIDADTGK

SEQ ID NO: 2519 - protein, 7 aa, Artificial Sequence
  Representative cyclic modulating agent based on PB-cadherin cell adhesion recognition sequence
DDIDADK

SEQ ID NO: 2520 - protein, 8 aa, Artificial Sequence
  Representative cyclic modulating agent based on PB-cadherin cell adhesion recognition sequence
DDIDADTK

SEQ ID NO: 2521 - protein, 9 aa, Artificial Sequence
  Representative cyclic modulating agent based on PB-cadherin cell adhesion recognition sequence
DDIDADTGK

SEQ ID NO: 2522 - protein, 8 aa, Artificial Sequence
  Representative cyclic modulating agent based on PB-cadherin cell adhesion recognition sequence
DFDIDADK

SEQ ID NO: 2523 - protein, 9 aa, Artificial Sequence
  Representative cyclic modulating agent based on PB-cadherin cell adhesion recognition sequence
DFDIDADTK

SEQ ID NO: 2524 - protein, 10 aa, Artificial Sequence
  Representative cyclic modulating agent based on PB-cadherin cell adhesion recognition sequence
DFDIDADTGK

SEQ ID NO: 2525 - protein, 9 aa, Artificial Sequence
  Representative cyclic modulating agent based on PB-cadherin cell adhesion recognition sequence
DIFDIDADK

SEQ ID NO: 2526 - protein, 10 aa, Artificial Sequence
  Representative cyclic modulating agent based on PB-cadherin cell adhesion recognition sequence
DIFDIDADTK

SEQ ID NO: 2527 - protein, 11 aa, Artificial Sequence
  Representative cyclic modulating agent based on PB-cadherin cell adhesion recognition sequence
DIFDIDADTGK

SEQ ID NO: 2528 - protein, 5 aa, Artificial Sequence
  Representative cyclic modulating agent based on PB-cadherin cell adhesion recognition sequence
KEEYE

SEQ ID NO: 2529 - protein, 6 aa, Artificial Sequence
  Representative cyclic modulating agent based on PB-cadherin cell adhesion recognition sequence
KEEYTE

SEQ ID NO: 2530 - protein, 7 aa, Artificial Sequence
  Representative cyclic modulating agent based on PB-cadherin cell adhesion recognition sequence
KEEYTGE

SEQ ID NO: 2531 - protein, 6 aa, Artificial Sequence
  Representative cyclic modulating agent based on PB-cadherin cell adhesion recognition sequence
KVEEYE

SEQ ID NO: 2532 - protein, 7 aa, Artificial Sequence
  Representative cyclic modulating agent based on PB-cadherin cell adhesion recognition sequence
KVEEYTE

SEQ ID NO: 2533 - protein, 8 aa, Artificial Sequence
  Representative cyclic modulating agent based on PB-cadherin cell adhesion recognition sequence
KVEEYTGE

SEQ ID NO: 2534 - protein, 7 aa, Artificial Sequence
  Representative cyclic modulating agent based on PB-cadherin cell adhesion recognition sequence
KVVEEYE

SEQ ID NO: 2535 - protein, 8 aa, Artificial Sequence
  Representative cyclic modulating agent based on PB-cadherin cell adhesion recognition sequence
KVVEEYTE

SEQ ID NO: 2536 - protein, 9 aa, Artificial Sequence
  Representative cyclic modulating agent based on PB-cadherin cell adhesion recognition sequence
KVVEEYTGE

SEQ ID NO: 2537 - protein, 8 aa, Artificial Sequence
  Representative cyclic modulating agent based on PB-cadherin cell adhesion recognition sequence
KFVVEEYE

SEQ ID NO: 2538 - protein, 8 aa, Artificial Sequence
  Representative cyclic modulating agent based on PB-cadherin cell adhesion recognition sequence
KFVEEYTE

SEQ ID NO: 2539 - protein, 9 aa, Artificial Sequence
  Representative cyclic modulating agent based on PB-cadherin cell adhesion recognition sequence
KFVEEYTGE

SEQ ID NO: 2540 - protein, 9 aa, Artificial Sequence
  Representative cyclic modulating agent based on PB-cadherin cell adhesion recognition sequence
KFFVVEEYE

SEQ ID NO: 2541 - protein, 10 aa, Artificial Sequence
  Representative cyclic modulating agent based on PB-cadherin cell adhesion recognition sequence
KFFVVEEYTE

SEQ ID NO: 2542 - protein, 11 aa, Artificial Sequence
  Representative cyclic modulating agent based on PB-cadherin cell adhesion recognition sequence
KFFVVEEYTGE

SEQ ID NO: 2543 - protein, 5 aa, Artificial Sequence
  Representative cyclic modulating agent based on PB-cadherin cell adhesion recognition sequence
KDELE

SEQ ID NO: 2544 - protein, 6 aa, Artificial Sequence
  Representative cyclic modulating agent based on PB-cadherin cell adhesion recognition sequence
KDELTE

SEQ ID NO: 2545 - protein, 7 aa, Artificial Sequence
  Representative cyclic modulating agent based on PB-cadherin cell adhesion recognition sequence
KDELTGE

SEQ ID NO: 2546 - protein, 6 aa, Artificial Sequence
  Representative cyclic modulating agent based on PB-cadherin cell adhesion recognition sequence
KIDELE

SEQ ID NO: 2547 - protein, 7 aa, Artificial Sequence
  Representative cyclic modulating agent based on PB-cadherin cell adhesion recognition sequence
KIDELTE

SEQ ID NO: 2548 - protein, 8 aa, Artificial Sequence
  Representative cyclic modulating agent based on PB-cadherin cell adhesion recognition sequence
KIDELTGE

SEQ ID NO: 2549 - protein, 7 aa, Artificial Sequence
  Representative cyclic modulating agent based on PB-cadherin cell adhesion recognition sequence
KLIDELE

SEQ ID NO: 2550 - protein, 8 aa, Artificial Sequence
  Representative cyclic modulating agent based on PB-cadherin cell adhesion recognition sequence
KLIDELTE

SEQ ID NO: 2551 - protein, 9 aa, Artificial Sequence
  Representative cyclic modulating agent based on PB-cadherin cell adhesion recognition sequence
KLIDELTGE

SEQ ID NO: 2552 - protein, 8 aa, Artificial Sequence
  Representative cyclic modulating agent based on PB-cadherin cell adhesion recognition sequence
KFLIDELE

SEQ ID NO: 2553 - protein, 9 aa, Artificial Sequence
  Representative cyclic modulating agent based on PB-cadherin cell adhesion recognition sequence
KFLIDELTE

SEQ ID NO: 2554 - protein, 10 aa, Artificial Sequence
  Representative cyclic modulating agent based on PB-cadherin cell adhesion recognition sequence
KFLIDELTGE

SEQ ID NO: 2555 - protein, 9 aa, Artificial Sequence
  Representative cyclic modulating agent based on PB-cadherin cell adhesion recognition sequence
KIFLIDELE

SEQ ID NO: 2556 - protein, 10 aa, Artificial Sequence
  Representative cyclic modulating agent based on PB-cadherin cell adhesion recognition sequence
KIFLIDELTE

SEQ ID NO: 2557 - protein, 11 aa, Artificial Sequence
  Representative cyclic modulating agent based on PB-cadherin cell adhesion recognition sequence
KIFLIDELTGE

SEQ ID NO: 2558 - protein, 5 aa, Artificial Sequence
  Representative cyclic modulating agent based on PB-cadherin cell adhesion recognition sequence
KDPKE

SEQ ID NO: 2559 - protein, 6 aa, Artificial Sequence
  Representative cyclic modulating agent based on PB-cadherin cell adhesion recognition sequence
KDPKTE

SEQ ID NO: 2560 - protein, 7 aa, Artificial Sequence
  Representative cyclic modulating agent based on PB-cadherin cell adhesion recognition sequence
KDPKTGE

SEQ ID NO: 2561 - protein, 6 aa, Artificial Sequence
  Representative cyclic modulating agent based on PB-cadherin cell adhesion recognition sequence
KVDPKE

SEQ ID NO: 2562 - protein, 7 aa, Artificial Sequence
  Representative cyclic modulating agent based on PB-cadherin cell adhesion recognition sequence
KVDPKTE

SEQ ID NO: 2563 - protein, 7 aa, Artificial Sequence
  Representative cyclic modulating agent based on PB-cadherin cell adhesion recognition sequence
KDPKTGE

SEQ ID NO: 2564 - protein, 7 aa, Artificial Sequence
  Representative cyclic modulating agent based on PB-cadherin cell adhesion recognition sequence
KTVDPKE

SEQ ID NO: 2565 - protein, 8 aa, Artificial Sequence
  Representative cyclic modulating agent based on PB-cadherin cell adhesion recognition sequence
KTVDPKTE

SEQ ID NO: 2566 - protein, 9 aa, Artificial Sequence
  Representative cyclic modulating agent based on PB-cadherin cell adhesion recognition sequence
KTVDPKTGE

SEQ ID NO: 2567 - protein, 8 aa, Artificial Sequence
  Representative cyclic modulating agent based on PB-cadherin cell adhesion recognition sequence
KFTVDPKE

SEQ ID NO: 2568 - protein, 9 aa, Artificial Sequence
  Representative cyclic modulating agent based on PB-cadherin cell adhesion recognition sequence
KFTVDPKTE

SEQ ID NO: 2569 - protein, 10 aa, Artificial Sequence
  Representative cyclic modulating agent based on PB-cadherin cell adhesion recognition sequence
KFTVDPKTGE

SEQ ID NO: 2570 - protein, 9 aa, Artificial Sequence
  Representative cyclic modulating agent based on PB-cadherin cell adhesion recognition sequence
KHFTVDPKE

SEQ ID NO: 2571 - protein, 10 aa, Artificial Sequence
  Representative cyclic modulating agent based on PB-cadherin cell adhesion recognition sequence
KHFTVDPKTE

SEQ ID NO: 2572 - protein, 11 aa, Artificial Sequence
  Representative cyclic modulating agent based on PB-cadherin cell adhesion recognition sequence
KHFTVDPKTGE

SEQ ID NO: 2573 - protein, 5 aa, Artificial Sequence
  Representative cyclic modulating agent based on PB-cadherin cell adhesion recognition sequence
KDADE

SEQ ID NO: 2574 - protein, 6 aa, Artificial Sequence
  Representative cyclic modulating agent based on PB-cadherin cell adhesion recognition sequence
KDADTE

SEQ ID NO: 2575 - protein, 7 aa, Artificial Sequence
  Representative cyclic modulating agent based on PB-cadherin cell adhesion recognition sequence
KDADTGE

SEQ ID NO: 2576 - protein, 6 aa, Artificial Sequence
  Representative cyclic modulating agent based on PB-cadherin cell adhesion recognition sequence
KIDADE

SEQ ID NO: 2577 - protein, 7 aa, Artificial Sequence
  Representative cyclic modulating agent based on PB-cadherin cell adhesion recognition sequence
KIDADTE

SEQ ID NO: 2578 - protein, 8 aa, Artificial Sequence
  Representative cyclic modulating agent based on PB-cadherin cell adhesion recognition sequence
KIDADTGE

SEQ ID NO: 2579 - protein, 7 aa, Artificial Sequence
  Representative cyclic modulating agent based on PB-cadherin cell adhesion recognition sequence
KDIDADE

SEQ ID NO: 2580 - protein, 8 aa, Artificial Sequence
  Representative cyclic modulating agent based on PB-cadherin cell adhesion recognition sequence
KDIDADTE

SEQ ID NO: 2581 - protein, 9 aa, Artificial Sequence
  Representative cyclic modulating agent based on PB-cadherin cell adhesion recognition sequence
KDIDADTGE

SEQ ID NO: 2582 - protein, 8 aa, Artificial Sequence
  Representative cyclic modulating agent based on PB-cadherin cell adhesion recognition sequence
KFDIDADE

SEQ ID NO: 2583 - protein, 9 aa, Artificial Sequence
  Representative cyclic modulating agent based on PB-cadherin cell adhesion recognition sequence
KFDIDADTE

SEQ ID NO: 2584 - protein, 10 aa, Artificial Sequence
  Representative cyclic modulating agent based on PB-cadherin cell adhesion recognition sequence
KFDIDADTGE

SEQ ID NO: 2585 - protein, 9 aa, Artificial Sequence
  Representative cyclic modulating agent based on PB-cadherin cell adhesion recognition sequence
KIFDIDADE

SEQ ID NO: 2586 - protein, 10 aa, Artificial Sequence
  Representative cyclic modulating agent based on PB-cadherin cell adhesion recognition sequence
KIFDIDADTE

SEQ ID NO: 2587 - protein, 11 aa, Artificial Sequence
  Representative cyclic modulating agent based on PB-cadherin cell adhesion recognition sequence
KIFDIDADTGE

SEQ ID NO: 2588 - protein, 5 aa, Artificial Sequence
  Representative cyclic modulating agent based on PB-cadherin cell adhesion recognition sequence
VEEYT

SEQ ID NO: 2589 - protein, 6 aa, Artificial Sequence
  Representative cyclic modulating agent based on PB-cadherin cell adhesion recognition sequence
VEEYTG

SEQ ID NO: 2590 - protein, 5 aa, Artificial Sequence
  Representative cyclic modulating agent based on PB-cadherin cell adhesion recognition sequence
VVEEY

SEQ ID NO: 2591 - protein, 6 aa, Artificial Sequence
  Representative cyclic modulating agent based on PB-cadherin cell adhesion recognition sequence
VVEEYT

SEQ ID NO: 2592 - protein, 7 aa, Artificial Sequence
  Representative cyclic modulating agent based on PB-cadherin cell adhesion recognition sequence
VVEEYTG

SEQ ID NO: 2593 - protein, 6 aa, Artificial Sequence
  Representative cyclic modulating agent based on PB-cadherin cell adhesion recognition sequence
FVVEEY

SEQ ID NO: 2594 - protein, 6 aa, Artificial Sequence
  Representative cyclic modulating agent based on PB-cadherin cell adhesion recognition sequence
FVEEYT

SEQ ID NO: 2595 - protein, 7 aa, Artificial Sequence
  Representative cyclic modulating agent based on PB-cadherin cell adhesion recognition sequence
FVEEYTG

SEQ ID NO: 2596 - protein, 7 aa, Artificial Sequence
  Representative cyclic modulating agent based on PB-cadherin cell adhesion recognition sequence
FFVVEEY

SEQ ID NO: 2597 - protein, 8 aa, Artificial Sequence
  Representative cyclic modulating agent based on PB-cadherin cell adhesion recognition sequence
FFVVEEYT

SEQ ID NO: 2598 - protein, 9 aa, Artificial Sequence
  Representative cyclic modulating agent based on PB-cadherin cell adhesion recognition sequence
FFVVEEYTG

SEQ ID NO: 2599 - protein, 5 aa, Artificial Sequence
  Representative cyclic modulating agent based on PB-cadherin cell adhesion recognition sequence
LIDEL

SEQ ID NO: 2600 - protein, 6 aa, Artificial Sequence
  Representative cyclic modulating agent based on PB-cadherin cell adhesion recognition sequence
LIDELT

SEQ ID NO: 2601 - protein, 7 aa, Artificial Sequence
  Representative cyclic modulating agent based on PB-cadherin cell adhesion recognition sequence
LIDELTG

SEQ ID NO: 2602 - protein, 6 aa, Artificial Sequence
  Representative cyclic modulating agent based on PB-cadherin cell adhesion recognition sequence
FLIDEL

SEQ ID NO: 2603 - protein, 7 aa, Artificial Sequence
  Representative cyclic modulating agent based on PB-cadherin cell adhesion recognition sequence
FLIDELT

SEQ ID NO: 2604 - protein, 8 aa, Artificial Sequence
  Representative cyclic modulating agent based on PB-cadherin cell adhesion recognition sequence
FLIDELTG

SEQ ID NO: 2605 - protein, 7 aa, Artificial Sequence
  Representative cyclic modulating agent based on PB-cadherin cell adhesion recognition sequence
IFLIDEL

SEQ ID NO: 2606 - protein, 8 aa, Artificial Sequence
  Representative cyclic modulating agent based on PB-cadherin cell adhesion recognition sequence
IFLIDELT

SEQ ID NO: 2607 - protein, 9 aa, Artificial Sequence
  Representative cyclic modulating agent based on PB-cadherin cell adhesion recognition sequence
IFLIDELTG

SEQ ID NO: 2608 - protein, 5 aa, Artificial Sequence
  Representative cyclic modulating agent based on PB-cadherin cell adhesion recognition sequence
TVDPK

SEQ ID NO: 2609 - protein, 6 aa, Artificial Sequence
  Representative cyclic modulating agent based on PB-cadherin cell adhesion recognition sequence
TVDPKT

SEQ ID NO: 2610 - protein, 7 aa, Artificial Sequence
  Representative cyclic modulating agent based on PB-cadherin cell adhesion recognition sequence
TVDPKTG

SEQ ID NO: 2611 - protein, 6 aa, Artificial Sequence
  Representative cyclic modulating agent based on PB-cadherin cell adhesion recognition sequence
FTVDPK

SEQ ID NO: 2612 - protein, 7 aa, Artificial Sequence
  Representative cyclic modulating agent based on PB-cadherin cell adhesion recognition sequence
FTVDPKT

SEQ ID NO: 2613 - protein, 8 aa, Artificial Sequence
  Representative cyclic modulating agent based on PB-cadherin cell adhesion recognition sequence
FTVDPKTG

SEQ ID NO: 2614 - protein, 7 aa, Artificial Sequence
  Representative cyclic modulating agent based on PB-cadherin cell adhesion recognition sequence
HFTVDPK

SEQ ID NO: 2615 - protein, 8 aa, Artificial Sequence
  Representative cyclic modulating agent based on PB-cadherin cell adhesion recognition sequence
HFTVDPKT

SEQ ID NO: 2616 - protein, 9 aa, Artificial Sequence
  Representative cyclic modulating agent based on PB-cadherin cell adhesion recognition sequence
HFTVDPKTG

SEQ ID NO: 2617 - protein, 5 aa, Artificial Sequence
  Representative cyclic modulating agent based on PB-cadherin cell adhesion recognition sequence
DADTG

SEQ ID NO: 2618 - protein, 5 aa, Artificial Sequence
  Representative cyclic modulating agent based on PB-cadherin cell adhesion recognition sequence
IDADT

SEQ ID NO: 2619 - protein, 6 aa, Artificial Sequence
  Representative cyclic modulating agent based on PB-cadherin cell adhesion recognition sequence
IDADTG

SEQ ID NO: 2620 - protein, 5 aa, Artificial Sequence
  Representative cyclic modulating agent based on PB-cadherin cell adhesion recognition sequence
DIDAD

SEQ ID NO: 2621 - protein, 6 aa, Artificial Sequence
  Representative cyclic modulating agent based on PB-cadherin cell adhesion recognition sequence
DIDADT

SEQ ID NO: 2622 - protein, 7 aa, Artificial Sequence
  Representative cyclic modulating agent based on PB-cadherin cell adhesion recognition sequence
DIDADTG

SEQ ID NO: 2623 - protein, 6 aa, Artificial Sequence
  Representative cyclic modulating agent based on PB-cadherin cell adhesion recognition sequence
FDIDAD

SEQ ID NO: 2624 - protein, 7 aa, Artificial Sequence
  Representative cyclic modulating agent based on PB-cadherin cell adhesion recognition sequence
FDIDADT

SEQ ID NO: 2625 - protein, 8 aa, Artificial Sequence
  Representative cyclic modulating agent based on PB-cadherin cell adhesion recognition sequence
FDIDADTG

SEQ ID NO: 2626 - protein, 7 aa, Artificial Sequence
  Representative cyclic modulating agent based on PB-cadherin cell adhesion recognition sequence
IFDIDAD

SEQ ID NO: 2627 - protein, 8 aa, Artificial Sequence
  Representative cyclic modulating agent based on PB-cadherin cell adhesion recognition sequence
IFDIDADT

SEQ ID NO: 2628 - protein, 9 aa, Artificial Sequence
  Representative cyclic modulating agent based on PB-cadherin cell adhesion recognition sequence
IFDIDADTG

SEQ ID NO: 2629 - protein, 5 aa, Artificial Sequence
  Representative cyclic modulating agent based on LI-cadherin cell adhesion recognition sequence
CNNKC

SEQ ID NO: 2630 - protein, 6 aa, Artificial Sequence
  Representative cyclic modulating agent based on LI-cadherin cell adhesion recognition sequence
CNNKTC

SEQ ID NO: 2631 - protein, 7 aa, Artificial Sequence
  Representative cyclic modulating agent based on LI-cadherin cell adhesion recognition sequence
CNNKTGC

SEQ ID NO: 2632 - protein, 6 aa, Artificial Sequence
  Representative cyclic modulating agent based on LI-cadherin cell adhesion recognition sequence
CINNKC

SEQ ID NO: 2633 - protein, 7 aa, Artificial Sequence
  Representative cyclic modulating agent based on LI-cadherin cell adhesion recognition sequence
CINNKTC

SEQ ID NO: 2634 - protein, 8 aa, Artificial Sequence
  Representative cyclic modulating agent based on LI-cadherin cell adhesion recognition sequence
CINNKTGC

SEQ ID NO: 2635 - protein, 7 aa, Artificial Sequence
  Representative cyclic modulating agent based on LI-cadherin cell adhesion recognition sequence
CQINNKC

SEQ ID NO: 2636 - protein, 8 aa, Artificial Sequence
  Representative cyclic modulating agent based on LI-cadherin cell adhesion recognition sequence
CQINNKTC

SEQ ID NO: 2637 - protein, 9 aa, Artificial Sequence
  Representative cyclic modulating agent based on LI-cadherin cell adhesion recognition sequence
CQINNKTGC

SEQ ID NO: 2638 - protein, 8 aa, Artificial Sequence
  Representative cyclic modulating agent based on LI-cadherin cell adhesion recognition sequence
CFQINNKC

SEQ ID NO: 2639 - protein, 9 aa, Artificial Sequence
  Representative cyclic modulating agent based on LI-cadherin cell adhesion recognition sequence
CFQINNKTC

SEQ ID NO: 2640 - protein, 10 aa, Artificial Sequence
  Representative cyclic modulating agent based on LI-cadherin cell adhesion recognition sequence
CFQINNKTGC

SEQ ID NO: 2641 - protein, 9 aa, Artificial Sequence
  Representative cyclic modulating agent based on LI-cadherin cell adhesion recognition sequence
CYFQINNKC

SEQ ID NO: 2642 - protein, 10 aa, Artificial Sequence
  Representative cyclic modulating agent based on LI-cadherin cell adhesion recognition sequence
CYFQINNKTC

SEQ ID NO: 2643 - protein, 11 aa, Artificial Sequence
  Representative cyclic modulating agent based on LI-cadherin cell adhesion recognition sequence
CYFQINNKTGC

SEQ ID NO: 2644 - protein, 5 aa, Artificial Sequence
  Representative cyclic modulating agent based on LI-cadherin cell adhesion recognition sequence
ENNKK

SEQ ID NO: 2645 - protein, 6 aa, Artificial Sequence
  Representative cyclic modulating agent based on LI-cadherin cell adhesion recognition sequence
ENNKTK

SEQ ID NO: 2646 - protein, 7 aa, Artificial Sequence
  Representative cyclic modulating agent based on LI-cadherin cell adhesion recognition sequence
ENNKTGK

SEQ ID NO: 2647 - protein, 6 aa, Artificial Sequence
  Representative cyclic modulating agent based on LI-cadherin cell adhesion recognition sequence
EINNKK

SEQ ID NO: 2648 - protein, 7 aa, Artificial Sequence
  Representative cyclic modulating agent based on LI-cadherin cell adhesion recognition sequence
EINNKTK

SEQ ID NO: 2649 - protein, 8 aa, Artificial Sequence
  Representative cyclic modulating agent based on LI-cadherin cell adhesion recognition sequence
EINNKTGK

SEQ ID NO: 2650 - protein, 7 aa, Artificial Sequence
  Representative cyclic modulating agent based on LI-cadherin cell adhesion recognition sequence
EQINNKK

SEQ ID NO: 2651 - protein, 8 aa, Artificial Sequence
  Representative cyclic modulating agent based on LI-cadherin cell adhesion recognition sequence
EQINNKTK

SEQ ID NO: 2652 - protein, 9 aa, Artificial Sequence
  Representative cyclic modulating agent based on LI-cadherin cell adhesion recognition sequence
EQINNKTGK

SEQ ID NO: 2653 - protein, 8 aa, Artificial Sequence
  Representative cyclic modulating agent based on LI-cadherin cell adhesion recognition sequence
EFQINNKK

SEQ ID NO: 2654 - protein, 9 aa, Artificial Sequence
  Representative cyclic modulating agent based on LI-cadherin cell adhesion recognition sequence
EFQINNKTK

SEQ ID NO: 2655 - protein, 10 aa, Artificial Sequence
  Representative cyclic modulating agent based on LI-cadherin cell adhesion recognition sequence
EFQINNKTGK

SEQ ID NO: 2656 - protein, 9 aa, Artificial Sequence
  Representative cyclic modulating agent based on LI-cadherin cell adhesion recognition sequence
EYFQINNKK

SEQ ID NO: 2657 - protein, 10 aa, Artificial Sequence
  Representative cyclic modulating agent based on LI-cadherin cell adhesion recognition sequence
EYFQINNKTK

SEQ ID NO: 2658 - protein, 11 aa, Artificial Sequence
  Representative cyclic modulating agent based on LI-cadherin cell adhesion recognition sequence
EYFQINNKTGK

SEQ ID NO: 2659 - protein, 5 aa, Artificial Sequence
  Representative cyclic modulating agent based on LI-cadherin cell adhesion recognition sequence
KNNKD

SEQ ID NO: 2660 - protein, 6 aa, Artificial Sequence
  Representative cyclic modulating agent based on LI-cadherin cell adhesion recognition sequence
KNNKTD

SEQ ID NO: 2661 - protein, 7 aa, Artificial Sequence
  Representative cyclic modulating agent based on LI-cadherin cell adhesion recognition sequence
KNNKTGD

SEQ ID NO: 2662 - protein, 6 aa, Artificial Sequence
  Representative cyclic modulating agent based on LI-cadherin cell adhesion recognition sequence
KINNKD

SEQ ID NO: 2663 - protein, 7 aa, Artificial Sequence
  Representative cyclic modulating agent based on LI-cadherin cell adhesion recognition sequence
KINNKTD

SEQ ID NO: 2664 - protein, 8 aa, Artificial Sequence
  Representative cyclic modulating agent based on LI-cadherin cell adhesion recognition sequence
KINNKTGD

SEQ ID NO: 2665 - protein, 7 aa, Artificial Sequence
  Representative cyclic modulating agent based on LI-cadherin cell adhesion recognition sequence
KQINNKD

SEQ ID NO: 2666 - protein, 8 aa, Artificial Sequence
  Representative cyclic modulating agent based on LI-cadherin cell adhesion recognition sequence
KQINNKTD

SEQ ID NO: 2667 - protein, 9 aa, Artificial Sequence
  Representative cyclic modulating agent based on LI-cadherin cell adhesion recognition sequence
KQINNKTGD

SEQ ID NO: 2668 - protein, 8 aa, Artificial Sequence
  Representative cyclic modulating agent based on LI-cadherin cell adhesion recognition sequence
KFQINNKD

SEQ ID NO: 2669 - protein, 9 aa, Artificial Sequence
  Representative cyclic modulating agent based on LI-cadherin cell adhesion recognition sequence
KFQINNKTD

SEQ ID NO: 2670 - protein, 10 aa, Artificial Sequence
  Representative cyclic modulating agent based on LI-cadherin cell adhesion recognition sequence
KFQINNKTGD

SEQ ID NO: 2671 - protein, 9 aa, Artificial Sequence
  Representative cyclic modulating agent based on LI-cadherin cell adhesion recognition sequence
KYFQINNKD

SEQ ID NO: 2672 - protein, 10 aa, Artificial Sequence
  Representative cyclic modulating agent based on LI-cadherin cell adhesion recognition sequence
KYFQINNKTD

SEQ ID NO: 2673 - protein, 11 aa, Artificial Sequence
  Representative cyclic modulating agent based on LI-cadherin cell adhesion recognition sequence
KYFQINNKTGD

SEQ ID NO: 2674 - protein, 5 aa, Artificial Sequence
  Representative cyclic modulating agent based on LI-cadherin cell adhesion recognition sequence
DNNKK

SEQ ID NO: 2675 - protein, 6 aa, Artificial Sequence
  Representative cyclic modulating agent based on LI-cadherin cell adhesion recognition sequence
DNNKTK

SEQ ID NO: 2676 - protein, 7 aa, Artificial Sequence
  Representative cyclic modulating agent based on LI-cadherin cell adhesion recognition sequence
DNNKTGK

SEQ ID NO: 2677 - protein, 6 aa, Artificial Sequence
  Representative cyclic modulating agent based on LI-cadherin cell adhesion recognition sequence
DINNKK

SEQ ID NO: 2678 - protein, 7 aa, Artificial Sequence
  Representative cyclic modulating agent based on LI-cadherin cell adhesion recognition sequence
DINNKTK

SEQ ID NO: 2679 - protein, 8 aa, Artificial Sequence
  Representative cyclic modulating agent based on LI-cadherin cell adhesion recognition sequence
DINNKTGK

SEQ ID NO: 2680 - protein, 7 aa, Artificial Sequence
  Representative cyclic modulating agent based on LI-cadherin cell adhesion recognition sequence
DQINNKK

SEQ ID NO: 2681 - protein, 8 aa, Artificial Sequence
  Representative cyclic modulating agent based on LI-cadherin cell adhesion recognition sequence
DQINNKTK

SEQ ID NO: 2682 - protein, 9 aa, Artificial Sequence
  Representative cyclic modulating agent based on LI-cadherin cell adhesion recognition sequence
DQINNKTGK

SEQ ID NO: 2683 - protein, 8 aa, Artificial Sequence
  Representative cyclic modulating agent based on LI-cadherin cell adhesion recognition sequence
DFQINNKK

SEQ ID NO: 2684 - protein, 9 aa, Artificial Sequence
  Representative cyclic modulating agent based on LI-cadherin cell adhesion recognition sequence
DFQINNKTK

SEQ ID NO: 2685 - protein, 10 aa, Artificial Sequence
  Representative cyclic modulating agent based on LI-cadherin cell adhesion recognition sequence
DFQINNKTGK

SEQ ID NO: 2686 - protein, 9 aa, Artificial Sequence
  Representative cyclic modulating agent based on LI-cadherin cell adhesion recognition sequence
DYFQINNKK

SEQ ID NO: 2687 - protein, 10 aa, Artificial Sequence
  Representative cyclic modulating agent based on LI-cadherin cell adhesion recognition sequence
DYFQINNKTK

SEQ ID NO: 2688 - protein, 11 aa, Artificial Sequence
  Representative cyclic modulating agent based on LI-cadherin cell adhesion recognition sequence
DYFQINNKTGK

SEQ ID NO: 2689 - protein, 5 aa, Artificial Sequence
  Representative cyclic modulating agent based on LI-cadherin cell adhesion recognition sequence
KNNKE

SEQ ID NO: 2690 - protein, 6 aa, Artificial Sequence
  Representative cyclic modulating agent based on LI-cadherin cell adhesion recognition sequence
KNNKTE

SEQ ID NO: 2691 - protein, 7 aa, Artificial Sequence
  Representative cyclic modulating agent based on LI-cadherin cell adhesion recognition sequence
KNNKTGE

SEQ ID NO: 2692 - protein, 6 aa, Artificial Sequence
  Representative cyclic modulating agent based on LI-cadherin cell adhesion recognition sequence
KINNKE

SEQ ID NO: 2693 - protein, 7 aa, Artificial Sequence
  Representative cyclic modulating agent based on LI-cadherin cell adhesion recognition sequence
KINNKTE

SEQ ID NO: 2694 - protein, 8 aa, Artificial Sequence
  Representative cyclic modulating agent based on LI-cadherin cell adhesion recognition sequence
KINNKTGE

SEQ ID NO: 2695 - protein, 7 aa, Artificial Sequence
  Representative cyclic modulating agent based on LI-cadherin cell adhesion recognition sequence
KQINNKE

SEQ ID NO: 2696 - protein, 8 aa, Artificial Sequence
  Representative cyclic modulating agent based on LI-cadherin cell adhesion recognition sequence
KQINNKTE

SEQ ID NO: 2697 - protein, 9 aa, Artificial Sequence
  Representative cyclic modulating agent based on LI-cadherin cell adhesion recognition sequence
KQINNKTGE

SEQ ID NO: 2698 - protein, 8 aa, Artificial Sequence
  Representative cyclic modulating agent based on LI-cadherin cell adhesion recognition sequence
KFQINNKE

SEQ ID NO: 2699 - protein, 9 aa, Artificial Sequence
  Representative cyclic modulating agent based on LI-cadherin cell adhesion recognition sequence
KFQINNKTE

SEQ ID NO: 2700 - protein, 10 aa, Artificial Sequence
  Representative cyclic modulating agent based on LI-cadherin cell adhesion recognition sequence
KFQINNKTGE

SEQ ID NO: 2701 - protein, 9 aa, Artificial Sequence
  Representative cyclic modulating agent based on LI-cadherin cell adhesion recognition sequence
KYFQINNKE

SEQ ID NO: 2702 - protein, 10 aa, Artificial Sequence
  Representative cyclic modulating agent based on LI-cadherin cell adhesion recognition sequence
KYFQINNKTE

SEQ ID NO: 2703 - protein, 11 aa, Artificial Sequence
  Representative cyclic modulating agent based on LI-cadherin cell adhesion recognition sequence
KYFQINNKTGE

SEQ ID NO: 2704 - protein, 5 aa, Artificial Sequence
  Representative cyclic modulating agent based on LI-cadherin cell adhesion recognition sequence
NNKTG

SEQ ID NO: 2705 - protein, 5 aa, Artificial Sequence
  Representative cyclic modulating agent based on LI-cadherin cell adhesion recognition sequence
INNKT

SEQ ID NO: 2706 - protein, 6 aa, Artificial Sequence
  Representative cyclic modulating agent based on LI-cadherin cell adhesion recognition sequence
INNKTG

SEQ ID NO: 2707 - protein, 5 aa, Artificial Sequence
  Representative cyclic modulating agent based on LI-cadherin cell adhesion recognition sequence
QINNK

SEQ ID NO: 2708 - protein, 6 aa, Artificial Sequence
  Representative cyclic modulating agent based on LI-cadherin cell adhesion recognition sequence
QINNKT

SEQ ID NO: 2709 - protein, 7 aa, Artificial Sequence
  Representative cyclic modulating agent based on LI-cadherin cell adhesion recognition sequence
QINNKTG

SEQ ID NO: 2710 - protein, 6 aa, Artificial Sequence
  Representative cyclic modulating agent based on LI-cadherin cell adhesion recognition sequence
FQINNK

SEQ ID NO: 2711 - protein, 7 aa, Artificial Sequence
  Representative cyclic modulating agent based on LI-cadherin cell adhesion recognition sequence
FQINNKT

SEQ ID NO: 2712 - protein, 8 aa, Artificial Sequence
  Representative cyclic modulating agent based on LI-cadherin cell adhesion recognition sequence
FQINNKTG

SEQ ID NO: 2713 - protein, 7 aa, Artificial Sequence
  Representative cyclic modulating agent based on LI-cadherin cell adhesion recognition sequence
YFQINNK

SEQ ID NO: 2714 - protein, 8 aa, Artificial Sequence
  Representative cyclic modulating agent based on LI-cadherin cell adhesion recognition sequence
YFQINNKT

SEQ ID NO: 2715 - protein, 9 aa, Artificial Sequence
  Representative cyclic modulating agent based on LI-cadherin cell adhesion recognition sequence
YFQINNKTG

SEQ ID NO: 2716 - protein, 5 aa, Artificial Sequence
  Representative cyclic modulating agent based on Protocadherin cell adhesion recognition sequence
CDLVC

SEQ ID NO: 2717 - protein, 6 aa, Artificial Sequence
  Representative cyclic modulating agent based on Protocadherin cell adhesion recognition sequence
CDLVTC

SEQ ID NO: 2718 - protein, 7 aa, Artificial Sequence
  Representative cyclic modulating agent based on Protocadherin cell adhesion recognition sequence
CDLVTGC

SEQ ID NO: 2719 - protein, 6 aa, Artificial Sequence
  Representative cyclic modulating agent based on Protocadherin cell adhesion recognition sequence
CLDLVC

SEQ ID NO: 2720 - protein, 7 aa, Artificial Sequence
  Representative cyclic modulating agent based on Protocadherin cell adhesion recognition sequence
CLDLVTC

SEQ ID NO: 2721 - protein, 8 aa, Artificial Sequence
  Representative cyclic modulating agent based on Protocadherin cell adhesion recognition sequence
CLDLVTGC

SEQ ID NO: 2722 - protein, 7 aa, Artificial Sequence
  Representative cyclic modulating agent based on Protocadherin cell adhesion recognition sequence
CALDLVC

SEQ ID NO: 2723 - protein, 8 aa, Artificial Sequence
  Representative cyclic modulating agent based on Protocadherin cell adhesion recognition sequence
CALDLVTC

SEQ ID NO: 2724 - protein, 9 aa, Artificial Sequence
  Representative cyclic modulating agent based on Protocadherin cell adhesion recognition sequence
CALDLVTGC

SEQ ID NO: 2725 - protein, 8 aa, Artificial Sequence
  Representative cyclic modulating agent based on Protocadherin cell adhesion recognition sequence
CFALDLVC

SEQ ID NO: 2726 - protein, 9 aa, Artificial Sequence
  Representative cyclic modulating agent based on Protocadherin cell adhesion recognition sequence
CFALDLVTC

SEQ ID NO: 2727 - protein, 10 aa, Artificial Sequence
  Representative cyclic modulating agent based on Protocadherin cell adhesion recognition sequence
CFALDLVTGC

SEQ ID NO: 2728 - protein, 9 aa, Artificial Sequence
  Representative cyclic modulating agent based on Protocadherin cell adhesion recognition sequence
CLFALDLVC

SEQ ID NO: 2729 - protein, 10 aa, Artificial Sequence
  Representative cyclic modulating agent based on Protocadherin cell adhesion recognition sequence
CLFALDLVTC

SEQ ID NO: 2730 - protein, 11 aa, Artificial Sequence
  Representative cyclic modulating agent based on Protocadherin cell adhesion recognition sequence
CLFALDLVTGC

SEQ ID NO: 2731 - protein, 5 aa, Artificial Sequence
  Representative cyclic modulating agent based on Protocadherin cell adhesion recognition sequence
CNRDC

SEQ ID NO: 2732 - protein, 6 aa, Artificial Sequence
  Representative cyclic modulating agent based on Protocadherin cell adhesion recognition sequence
CNRDNC

SEQ ID NO: 2733 - protein, 7 aa, Artificial Sequence
  Representative cyclic modulating agent based on Protocadherin cell adhesion recognition sequence
CNRDNGC

SEQ ID NO: 2734 - protein, 6 aa, Artificial Sequence
  Representative cyclic modulating agent based on Protocadherin cell adhesion recognition sequence
CINRDC

SEQ ID NO: 2735 - protein, 7 aa, Artificial Sequence
  Representative cyclic modulating agent based on Protocadherin cell adhesion recognition sequence
CINRDNC

SEQ ID NO: 2736 - protein, 8 aa, Artificial Sequence
  Representative cyclic modulating agent based on Protocadherin cell adhesion recognition sequence
CINRDNGC

SEQ ID NO: 2737 - protein, 7 aa, Artificial Sequence
  Representative cyclic modulating agent based on Protocadherin cell adhesion recognition sequence
CTINRDC

SEQ ID NO: 2738 - protein, 8 aa, Artificial Sequence
  Representative cyclic modulating agent based on Protocadherin cell adhesion recognition sequence
CTINRDNC

SEQ ID NO: 2739 - protein, 9 aa, Artificial Sequence
  Representative cyclic modulating agent based on Protocadherin cell adhesion recognition sequence
CTINRDNGC

SEQ ID NO: 2740 - protein, 8 aa, Artificial Sequence
  Representative cyclic modulating agent based on Protocadherin cell adhesion recognition sequence
CFTINRDC

SEQ ID NO: 2741 - protein, 9 aa, Artificial Sequence
  Representative cyclic modulating agent based on Protocadherin cell adhesion recognition sequence
CFTINRDNC

SEQ ID NO: 2742 - protein, 10 aa, Artificial Sequence
  Representative cyclic modulating agent based on Protocadherin cell adhesion recognition sequence
CFTINRDNGC

SEQ ID NO: 2743 - protein, 9 aa, Artificial Sequence
  Representative cyclic modulating agent based on Protocadherin cell adhesion recognition sequence
CYFTINRDC

SEQ ID NO: 2744 - protein, 10 aa, Artificial Sequence
  Representative cyclic modulating agent based on Protocadherin cell adhesion recognition sequence
CYFTINRDNC

SEQ ID NO: 2745 - protein, 11 aa, Artificial Sequence
  Representative cyclic modulating agent based on Protocadherin cell adhesion recognition sequence
CYFTINRDNGC

SEQ ID NO: 2746 - protein, 5 aa, Artificial Sequence
  Representative cyclic modulating agent based on Protocadherin cell adhesion recognition sequence
CDPSC

SEQ ID NO: 2747 - protein, 6 aa, Artificial Sequence
  Representative cyclic modulating agent based on Protocadherin cell adhesion recognition sequence
CDPSSC

SEQ ID NO: 2748 - protein, 7 aa, Artificial Sequence
  Representative cyclic modulating agent based on Protocadherin cell adhesion recognition sequence
CDPSSGC

SEQ ID NO: 2749 - protein, 6 aa, Artificial Sequence
  Representative cyclic modulating agent based on Protocadherin cell adhesion recognition sequence
CIDPSC

SEQ ID NO: 2750 - protein, 7 aa, Artificial Sequence
  Representative cyclic modulating agent based on Protocadherin cell adhesion recognition sequence
CIDPSSC

SEQ ID NO: 2751 - protein, 8 aa, Artificial Sequence
  Representative cyclic modulating agent based on Protocadherin cell adhesion recognition sequence
CIDPSSGC

SEQ ID NO: 2752 - protein, 7 aa, Artificial Sequence
  Representative cyclic modulating agent based on Protocadherin cell adhesion recognition sequence
CEIDPSC

SEQ ID NO: 2753 - protein, 8 aa, Artificial Sequence
  Representative cyclic modulating agent based on Protocadherin cell adhesion recognition sequence
CEIDPSSC

SEQ ID NO: 2754 - protein, 9 aa, Artificial Sequence
  Representative cyclic modulating agent based on Protocadherin cell adhesion recognition sequence
CEIDPSSGC

SEQ ID NO: 2755 - protein, 8 aa, Artificial Sequence
  Representative cyclic modulating agent based on Protocadherin cell adhesion recognition sequence
CFEIDPSC

SEQ ID NO: 2756 - protein, 9 aa, Artificial Sequence
  Representative cyclic modulating agent based on Protocadherin cell adhesion recognition sequence
CFEIDPSSC

SEQ ID NO: 2757 - protein, 9 aa, Artificial Sequence
  Representative cyclic modulating agent based on Protocadherin cell adhesion recognition sequence
CEIDPSSGC

SEQ ID NO: 2758 - protein, 8 aa, Artificial Sequence
  Representative cyclic modulating agent based on Protocadherin cell adhesion recognition sequence
CFEIDPSC

SEQ ID NO: 2759 - protein, 9 aa, Artificial Sequence
  Representative cyclic modulating agent based on Protocadherin cell adhesion recognition sequence
CFEIDPSSC

SEQ ID NO: 2760 - protein, 10 aa, Artificial Sequence
  Representative cyclic modulating agent based on Protocadherin cell adhesion recognition sequence
CFEIDPSSGC

SEQ ID NO: 2761 - protein, 9 aa, Artificial Sequence
  Representative cyclic modulating agent based on Protocadherin cell adhesion recognition sequence
CLFEIDPSC

SEQ ID NO: 2762 - protein, 10 aa, Artificial Sequence
  Representative cyclic modulating agent based on Protocadherin cell adhesion recognition sequence
CLFEIDPSSC

SEQ ID NO: 2763 - protein, 11 aa, Artificial Sequence
  Representative cyclic modulating agent based on Protocadherin cell adhesion recognition sequence
CLFEIDPSSGC

SEQ ID NO: 2764 - protein, 5 aa, Artificial Sequence
  Representative cyclic modulating agent based on Protocadherin cell adhesion recognition sequence
EDLVK

SEQ ID NO: 2765 - protein, 6 aa, Artificial Sequence
  Representative cyclic modulating agent based on Protocadherin cell adhesion recognition sequence
EDLVTK

SEQ ID NO: 2766 - protein, 7 aa, Artificial Sequence
  Representative cyclic modulating agent based on Protocadherin cell adhesion recognition sequence
EDLVTGK

SEQ ID NO: 2767 - protein, 6 aa, Artificial Sequence
  Representative cyclic modulating agent based on Protocadherin cell adhesion recognition sequence
ELDLVK

SEQ ID NO: 2768 - protein, 7 aa, Artificial Sequence
  Representative cyclic modulating agent based on Protocadherin cell adhesion recognition sequence
ELDLVTK

SEQ ID NO: 2769 - protein, 8 aa, Artificial Sequence
  Representative cyclic modulating agent based on Protocadherin cell adhesion recognition sequence
ELDLVTGK

SEQ ID NO: 2770 - protein, 7 aa, Artificial Sequence
  Representative cyclic modulating agent based on Protocadherin cell adhesion recognition sequence
EALDLVK

SEQ ID NO: 2771 - protein, 8 aa, Artificial Sequence
  Representative cyclic modulating agent based on Protocadherin cell adhesion recognition sequence
EALDLVTK

SEQ ID NO: 2772 - protein, 9 aa, Artificial Sequence
  Representative cyclic modulating agent based on Protocadherin cell adhesion recognition sequence
EALDLVTGK

SEQ ID NO: 2773 - protein, 8 aa, Artificial Sequence
  Representative cyclic modulating agent based on Protocadherin cell adhesion recognition sequence
EFALDLVK

SEQ ID NO: 2774 - protein, 9 aa, Artificial Sequence
  Representative cyclic modulating agent based on Protocadherin cell adhesion recognition sequence
EFALDLVTK

SEQ ID NO: 2775 - protein, 10 aa, Artificial Sequence
  Representative cyclic modulating agent based on Protocadherin cell adhesion recognition sequence
EFALDLVTGK

SEQ ID NO: 2776 - protein, 9 aa, Artificial Sequence
  Representative cyclic modulating agent based on Protocadherin cell adhesion recognition sequence
ELFALDLVK

SEQ ID NO: 2777 - protein, 10 aa, Artificial Sequence
  Representative cyclic modulating agent based on Protocadherin cell adhesion recognition sequence
ELFALDLVTK

SEQ ID NO: 2778 - protein, 11 aa, Artificial Sequence
  Representative cyclic modulating agent based on Protocadherin cell adhesion recognition sequence
ELFALDLVTGK

SEQ ID NO: 2779 - protein, 5 aa, Artificial Sequence
  Representative cyclic modulating agent based on Protocadherin cell adhesion recognition sequence
ENRDK

SEQ ID NO: 2780 - protein, 6 aa, Artificial Sequence
  Representative cyclic modulating agent based on Protocadherin cell adhesion recognition sequence
ENRDNK

SEQ ID NO: 2781 - protein, 7 aa, Artificial Sequence
  Representative cyclic modulating agent based on Protocadherin cell adhesion recognition sequence
ENRDNGK

SEQ ID NO: 2782 - protein, 6 aa, Artificial Sequence
  Representative cyclic modulating agent based on Protocadherin cell adhesion recognition sequence
EINRDK

SEQ ID NO: 2783 - protein, 7 aa, Artificial Sequence
  Representative cyclic modulating agent based on Protocadherin cell adhesion recognition sequence
EINRDNK

SEQ ID NO: 2784 - protein, 8 aa, Artificial Sequence
  Representative cyclic modulating agent based on Protocadherin cell adhesion recognition sequence
EINRDNGK

SEQ ID NO: 2785 - protein, 7 aa, Artificial Sequence
  Representative cyclic modulating agent based on Protocadherin cell adhesion recognition sequence
ETINRDK

SEQ ID NO: 2786 - protein, 8 aa, Artificial Sequence
  Representative cyclic modulating agent based on Protocadherin cell adhesion recognition sequence
ETINRDNK

SEQ ID NO: 2787 - protein, 9 aa, Artificial Sequence
  Representative cyclic modulating agent based on Protocadherin cell adhesion recognition sequence
ETINRDNGK

SEQ ID NO: 2788 - protein, 8 aa, Artificial Sequence
  Representative cyclic modulating agent based on Protocadherin cell adhesion recognition sequence
EFTINRDK

SEQ ID NO: 2789 - protein, 9 aa, Artificial Sequence
  Representative cyclic modulating agent based on Protocadherin cell adhesion recognition sequence
EFTINRDNK

SEQ ID NO: 2790 - protein, 10 aa, Artificial Sequence
  Representative cyclic modulating agent based on Protocadherin cell adhesion recognition sequence
EFTINRDNGK

SEQ ID NO: 2791 - protein, 9 aa, Artificial Sequence
  Representative cyclic modulating agent based on Protocadherin cell adhesion recognition sequence
EYFTINRDK

SEQ ID NO: 2792 - protein, 10 aa, Artificial Sequence
  Representative cyclic modulating agent based on Protocadherin cell adhesion recognition sequence
EYFTINRDNK

SEQ ID NO: 2793 - protein, 11 aa, Artificial Sequence
  Representative cyclic modulating agent based on Protocadherin cell adhesion recognition sequence
EYFTINRDNGK

SEQ ID NO: 2794 - protein, 5 aa, Artificial Sequence
  Representative cyclic modulating agent based on Protocadherin cell adhesion recognition sequence
EDPKK

SEQ ID NO: 2795 - protein, 6 aa, Artificial Sequence
  Representative cyclic modulating agent based on Protocadherin cell adhesion recognition sequence
EDPKTK

SEQ ID NO: 2796 - protein, 7 aa, Artificial Sequence
  Representative cyclic modulating agent based on Protocadherin cell adhesion recognition sequence
EDPKTGK

SEQ ID NO: 2797 - protein, 6 aa, Artificial Sequence
  Representative cyclic modulating agent based on Protocadherin cell adhesion recognition sequence
EIDPKK

SEQ ID NO: 2798 - protein, 7 aa, Artificial Sequence
  Representative cyclic modulating agent based on Protocadherin cell adhesion recognition sequence
EIDPKTK

SEQ ID NO: 2799 - protein, 8 aa, Artificial Sequence
  Representative cyclic modulating agent based on Protocadherin cell adhesion recognition sequence
EIDPKTGK

SEQ ID NO: 2800 - protein, 7 aa, Artificial Sequence
  Representative cyclic modulating agent based on Protocadherin cell adhesion recognition sequence
ESIDPKK

SEQ ID NO: 2801 - protein, 8 aa, Artificial Sequence
  Representative cyclic modulating agent based on Protocadherin cell adhesion recognition sequence
ESIDPKTK

SEQ ID NO: 2802 - protein, 9 aa, Artificial Sequence
  Representative cyclic modulating agent based on Protocadherin cell adhesion recognition sequence
ESIDPKTGK

SEQ ID NO: 2803 - protein, 8 aa, Artificial Sequence
  Representative cyclic modulating agent based on Protocadherin cell adhesion recognition sequence
EFSIDPKK

SEQ ID NO: 2804 - protein, 9 aa, Artificial Sequence
  Representative cyclic modulating agent based on Protocadherin cell adhesion recognition sequence
EFSIDPKTK

SEQ ID NO: 2805 - protein, 10 aa, Artificial Sequence
  Representative cyclic modulating agent based on Protocadherin cell adhesion recognition sequence
EFSIDPKTGK

SEQ ID NO: 2806 - protein, 9 aa, Artificial Sequence
  Representative cyclic modulating agent based on Protocadherin cell adhesion recognition sequence
ELFSIDPKK

SEQ ID NO: 2807 - protein, 10 aa, Artificial Sequence
  Representative cyclic modulating agent based on Protocadherin cell adhesion recognition sequence
ELFSIDPKTK

SEQ ID NO: 2808 - protein, 11 aa, Artificial Sequence
  Representative cyclic modulating agent based on Protocadherin cell adhesion recognition sequence
ELFSIDPKTGK

SEQ ID NO: 2809 - protein, 5 aa, Artificial Sequence
  Representative cyclic modulating agent based on Protocadherin cell adhesion recognition sequence
EDPSK

SEQ ID NO: 2810 - protein, 6 aa, Artificial Sequence
  Representative cyclic modulating agent based on Protocadherin cell adhesion recognition sequence
EDPSSK

SEQ ID NO: 2811 - protein, 7 aa, Artificial Sequence
  Representative cyclic modulating agent based on Protocadherin cell adhesion recognition sequence
EDPSSGK

SEQ ID NO: 2812 - protein, 6 aa, Artificial Sequence
  Representative cyclic modulating agent based on Protocadherin cell adhesion recognition sequence
EIDPSK

SEQ ID NO: 2813 - protein, 7 aa, Artificial Sequence
  Representative cyclic modulating agent based on Protocadherin cell adhesion recognition sequence
EIDPSSK

SEQ ID NO: 2814 - protein, 8 aa, Artificial Sequence
  Representative cyclic modulating agent based on Protocadherin cell adhesion recognition sequence
EIDPSSGK

SEQ ID NO: 2815 - protein, 7 aa, Artificial Sequence
  Representative cyclic modulating agent based on Protocadherin cell adhesion recognition sequence
EEIDPSK

SEQ ID NO: 2816 - protein, 8 aa, Artificial Sequence
  Representative cyclic modulating agent based on Protocadherin cell adhesion recognition sequence
EEIDPSSK

SEQ ID NO: 2817 - protein, 9 aa, Artificial Sequence
  Representative cyclic modulating agent based on Protocadherin cell adhesion recognition sequence
EEIDPSSGK

SEQ ID NO: 2818 - protein, 8 aa, Artificial Sequence
  Representative cyclic modulating agent based on Protocadherin cell adhesion recognition sequence
EFEIDPSK

SEQ ID NO: 2819 - protein, 9 aa, Artificial Sequence
  Representative cyclic modulating agent based on Protocadherin cell adhesion recognition sequence
EFEIDPSSK

SEQ ID NO: 2820 - protein, 9 aa, Artificial Sequence
  Representative cyclic modulating agent based on Protocadherin cell adhesion recognition sequence
EEIDPSSGK

SEQ ID NO: 2821 - protein, 8 aa, Artificial Sequence
  Representative cyclic modulating agent based on Protocadherin cell adhesion recognition sequence
EFEIDPSK

SEQ ID NO: 2822 - protein, 9 aa, Artificial Sequence
  Representative cyclic modulating agent based on Protocadherin cell adhesion recognition sequence
EFEIDPSSK

SEQ ID NO: 2823 - protein, 10 aa, Artificial Sequence
  Representative cyclic modulating agent based on Protocadherin cell adhesion recognition sequence
EFEIDPSSGK

SEQ ID NO: 2824 - protein, 9 aa, Artificial Sequence
  Representative cyclic modulating agent based on Protocadherin cell adhesion recognition sequence
ELFEIDPSK

SEQ ID NO: 2825 - protein, 10 aa, Artificial Sequence
  Representative cyclic modulating agent based on Protocadherin cell adhesion recognition sequence
ELFEIDPSSK

SEQ ID NO: 2826 - protein, 11 aa, Artificial Sequence
  Representative cyclic modulating agent based on Protocadherin cell adhesion recognition sequence
ELFEIDPSSGK

SEQ ID NO: 2827 - protein, 5 aa, Artificial Sequence
  Representative cyclic modulating agent based on Protocadherin cell adhesion recognition sequence
KDLVD

SEQ ID NO: 2828 - protein, 6 aa, Artificial Sequence
  Representative cyclic modulating agent based on Protocadherin cell adhesion recognition sequence
KDLVTD

SEQ ID NO: 2829 - protein, 7 aa, Artificial Sequence
  Representative cyclic modulating agent based on Protocadherin cell adhesion recognition sequence
KDLVTGD

SEQ ID NO: 2830 - protein, 6 aa, Artificial Sequence
  Representative cyclic modulating agent based on Protocadherin cell adhesion recognition sequence
KLDLVD

SEQ ID NO: 2831 - protein, 7 aa, Artificial Sequence
  Representative cyclic modulating agent based on Protocadherin cell adhesion recognition sequence
KLDLVTD

SEQ ID NO: 2832 - protein, 8 aa, Artificial Sequence
  Representative cyclic modulating agent based on Protocadherin cell adhesion recognition sequence
KLDLVTGD

SEQ ID NO: 2833 - protein, 7 aa, Artificial Sequence
  Representative cyclic modulating agent based on Protocadherin cell adhesion recognition sequence
KALDLVD

SEQ ID NO: 2834 - protein, 8 aa, Artificial Sequence
  Representative cyclic modulating agent based on Protocadherin cell adhesion recognition sequence
KALDLVTD

SEQ ID NO: 2835 - protein, 9 aa, Artificial Sequence
  Representative cyclic modulating agent based on Protocadherin cell adhesion recognition sequence
KALDLVTGD

SEQ ID NO: 2836 - protein, 8 aa, Artificial Sequence
  Representative cyclic modulating agent based on Protocadherin cell adhesion recognition sequence
KFALDLVD

SEQ ID NO: 2837 - protein, 9 aa, Artificial Sequence
  Representative cyclic modulating agent based on Protocadherin cell adhesion recognition sequence
KFALDLVTD

SEQ ID NO: 2838 - protein, 10 aa, Artificial Sequence
  Representative cyclic modulating agent based on Protocadherin cell adhesion recognition sequence
KFALDLVTGD

SEQ ID NO: 2839 - protein, 9 aa, Artificial Sequence
  Representative cyclic modulating agent based on Protocadherin cell adhesion recognition sequence
KLFALDLVD

SEQ ID NO: 2840 - protein, 10 aa, Artificial Sequence
  Representative cyclic modulating agent based on Protocadherin cell adhesion recognition sequence
KLFALDLVTD

SEQ ID NO: 2841 - protein, 11 aa, Artificial Sequence
  Representative cyclic modulating agent based on Protocadherin cell adhesion recognition sequence
KLFALDLVTGD

SEQ ID NO: 2842 - protein, 5 aa, Artificial Sequence
  Representative cyclic modulating agent based on Protocadherin cell adhesion recognition sequence
KNRDD

SEQ ID NO: 2843 - protein, 6 aa, Artificial Sequence
  Representative cyclic modulating agent based on Protocadherin cell adhesion recognition sequence
KNRDND

SEQ ID NO: 2844 - protein, 7 aa, Artificial Sequence
  Representative cyclic modulating agent based on Protocadherin cell adhesion recognition sequence
KNRDNGD

SEQ ID NO: 2845 - protein, 6 aa, Artificial Sequence
  Representative cyclic modulating agent based on Protocadherin cell adhesion recognition sequence
KINRDD

SEQ ID NO: 2846 - protein, 7 aa, Artificial Sequence
  Representative cyclic modulating agent based on Protocadherin cell adhesion recognition sequence
KINRDND

SEQ ID NO: 2847 - protein, 8 aa, Artificial Sequence
  Representative cyclic modulating agent based on Protocadherin cell adhesion recognition sequence
KINRDNGD

SEQ ID NO: 2848 - protein, 7 aa, Artificial Sequence
  Representative cyclic modulating agent based on Protocadherin cell adhesion recognition sequence
KTINRDD

SEQ ID NO: 2849 - protein, 8 aa, Artificial Sequence
  Representative cyclic modulating agent based on Protocadherin cell adhesion recognition sequence
KTINRDND

SEQ ID NO: 2850 - protein, 9 aa, Artificial Sequence
  Representative cyclic modulating agent based on Protocadherin cell adhesion recognition sequence
KTINRDNGD

SEQ ID NO: 2851 - protein, 8 aa, Artificial Sequence
  Representative cyclic modulating agent based on Protocadherin cell adhesion recognition sequence
KFTINRDD

SEQ ID NO: 2852 - protein, 9 aa, Artificial Sequence
  Representative cyclic modulating agent based on Protocadherin cell adhesion recognition sequence
KFTINRDND

SEQ ID NO: 2853 - protein, 10 aa, Artificial Sequence
  Representative cyclic modulating agent based on Protocadherin cell adhesion recognition sequence
KFTINRDNGD

SEQ ID NO: 2854 - protein, 9 aa, Artificial Sequence
  Representative cyclic modulating agent based on Protocadherin cell adhesion recognition sequence
KYFTINRDD

SEQ ID NO: 2855 - protein, 10 aa, Artificial Sequence
  Representative cyclic modulating agent based on Protocadherin cell adhesion recognition sequence
KYFTINRDND

SEQ ID NO: 2856 - protein, 11 aa, Artificial Sequence
  Representative cyclic modulating agent based on Protocadherin cell adhesion recognition sequence
KYFTINRDNGD

SEQ ID NO: 2857 - protein, 5 aa, Artificial Sequence
  Representative cyclic modulating agent based on Protocadherin cell adhesion recognition sequence
KDPKD

SEQ ID NO: 2858 - protein, 6 aa, Artificial Sequence
  Representative cyclic modulating agent based on Protocadherin cell adhesion recognition sequence
KDPKTD

SEQ ID NO: 2859 - protein, 7 aa, Artificial Sequence
  Representative cyclic modulating agent based on Protocadherin cell adhesion recognition sequence
KDPKTGD

SEQ ID NO: 2860 - protein, 6 aa, Artificial Sequence
  Representative cyclic modulating agent based on Protocadherin cell adhesion recognition sequence
KIDPKD

SEQ ID NO: 2861 - protein, 7 aa, Artificial Sequence
  Representative cyclic modulating agent based on Protocadherin cell adhesion recognition sequence
KIDPKTD

SEQ ID NO: 2862 - protein, 8 aa, Artificial Sequence
  Representative cyclic modulating agent based on Protocadherin cell adhesion recognition sequence
KIDPKTGD

SEQ ID NO: 2863 - protein, 7 aa, Artificial Sequence
  Representative cyclic modulating agent based on Protocadherin cell adhesion recognition sequence
KSIDPKD

SEQ ID NO: 2864 - protein, 8 aa, Artificial Sequence
  Representative cyclic modulating agent based on Protocadherin cell adhesion recognition sequence
KSIDPKTD

SEQ ID NO: 2865 - protein, 9 aa, Artificial Sequence
  Representative cyclic modulating agent based on Protocadherin cell adhesion recognition sequence
KSIDPKTGD

SEQ ID NO: 2866 - protein, 8 aa, Artificial Sequence
  Representative cyclic modulating agent based on Protocadherin cell adhesion recognition sequence
KFSIDPKD

SEQ ID NO: 2867 - protein, 9 aa, Artificial Sequence
  Representative cyclic modulating agent based on Protocadherin cell adhesion recognition sequence
KFSIDPKTD

SEQ ID NO: 2868 - protein, 10 aa, Artificial Sequence
  Representative cyclic modulating agent based on Protocadherin cell adhesion recognition sequence
KFSIDPKTGD

SEQ ID NO: 2869 - protein, 9 aa, Artificial Sequence
  Representative cyclic modulating agent based on Protocadherin cell adhesion recognition sequence
KLFSIDPKD

SEQ ID NO: 2870 - protein, 10 aa, Artificial Sequence
  Representative cyclic modulating agent based on Protocadherin cell adhesion recognition sequence
KLFSIDPKTD

SEQ ID NO: 2871 - protein, 11 aa, Artificial Sequence
  Representative cyclic modulating agent based on Protocadherin cell adhesion recognition sequence
KLFSIDPKTGD

SEQ ID NO: 2872 - protein, 5 aa, Artificial Sequence
  Representative cyclic modulating agent based on Protocadherin cell adhesion recognition sequence
KDPSD

SEQ ID NO: 2873 - protein, 6 aa, Artificial Sequence
  Representative cyclic modulating agent based on Protocadherin cell adhesion recognition sequence
KDPSSD

SEQ ID NO: 2874 - protein, 7 aa, Artificial Sequence
  Representative cyclic modulating agent based on Protocadherin cell adhesion recognition sequence
KDPSSGD

SEQ ID NO: 2875 - protein, 6 aa, Artificial Sequence
  Representative cyclic modulating agent based on Protocadherin cell adhesion recognition sequence
KIDPSD

SEQ ID NO: 2876 - protein, 7 aa, Artificial Sequence
  Representative cyclic modulating agent based on Protocadherin cell adhesion recognition sequence
KIDPSSD

SEQ ID NO: 2877 - protein, 8 aa, Artificial Sequence
  Representative cyclic modulating agent based on Protocadherin cell adhesion recognition sequence
KIDPSSGD

SEQ ID NO: 2878 - protein, 7 aa, Artificial Sequence
  Representative cyclic modulating agent based on Protocadherin cell adhesion recognition sequence
KEIDPSD

SEQ ID NO: 2879 - protein, 8 aa, Artificial Sequence
  Representative cyclic modulating agent based on Protocadherin cell adhesion recognition sequence
KEIDPSSD

SEQ ID NO: 2880 - protein, 9 aa, Artificial Sequence
  Representative cyclic modulating agent based on Protocadherin cell adhesion recognition sequence
KEIDPSSGD

SEQ ID NO: 2881 - protein, 8 aa, Artificial Sequence
  Representative cyclic modulating agent based on Protocadherin cell adhesion recognition sequence
KFEIDPSD

SEQ ID NO: 2882 - protein, 9 aa, Artificial Sequence
  Representative cyclic modulating agent based on Protocadherin cell adhesion recognition sequence
KFEIDPSSD

SEQ ID NO: 2883 - protein, 7 aa, Artificial Sequence
  Representative cyclic modulating agent based on Protocadherin cell adhesion recognition sequence
DINENTK

SEQ ID NO: 2884 - protein, 8 aa, Artificial Sequence
  Representative cyclic modulating agent based on Protocadherin cell adhesion recognition sequence
DIINENTK

SEQ ID NO: 2885 - protein, 9 aa, Artificial Sequence
  Representative cyclic modulating agent based on Protocadherin cell adhesion recognition sequence
DFIINENTK

SEQ ID NO: 2886 - protein, 10 aa, Artificial Sequence
  Representative cyclic modulating agent based on Protocadherin cell adhesion recognition sequence
KFEIDPSSGD

SEQ ID NO: 2887 - protein, 9 aa, Artificial Sequence
  Representative cyclic modulating agent based on Protocadherin cell adhesion recognition sequence
KLFEIDPSD

SEQ ID NO: 2888 - protein, 10 aa, Artificial Sequence
  Representative cyclic modulating agent based on Protocadherin cell adhesion recognition sequence
KLFEIDPSSD

SEQ ID NO: 2889 - protein, 11 aa, Artificial Sequence
  Representative cyclic modulating agent based on Protocadherin cell adhesion recognition sequence
KLFEIDPSSGD

SEQ ID NO: 2890 - protein, 5 aa, Artificial Sequence
  Representative cyclic modulating agent based on Protocadherin cell adhesion recognition sequence
KDLVE

SEQ ID NO: 2891 - protein, 6 aa, Artificial Sequence
  Representative cyclic modulating agent based on Protocadherin cell adhesion recognition sequence
KDLVTE

SEQ ID NO: 2892 - protein, 7 aa, Artificial Sequence
  Representative cyclic modulating agent based on Protocadherin cell adhesion recognition sequence
KDLVTGE

SEQ ID NO: 2893 - protein, 6 aa, Artificial Sequence
  Representative cyclic modulating agent based on Protocadherin cell adhesion recognition sequence
KLDLVE

SEQ ID NO: 2894 - protein, 7 aa, Artificial Sequence
  Representative cyclic modulating agent based on Protocadherin cell adhesion recognition sequence
KLDLVTE

SEQ ID NO: 2895 - protein, 8 aa, Artificial Sequence
  Representative cyclic modulating agent based on Protocadherin cell adhesion recognition sequence
KLDLVTGE

SEQ ID NO: 2896 - protein, 7 aa, Artificial Sequence
  Representative cyclic modulating agent based on Protocadherin cell adhesion recognition sequence
KALDLVE

SEQ ID NO: 2897 - protein, 8 aa, Artificial Sequence
  Representative cyclic modulating agent based on Protocadherin cell adhesion recognition sequence
KALDLVTE

SEQ ID NO: 2898 - protein, 9 aa, Artificial Sequence
  Representative cyclic modulating agent based on Protocadherin cell adhesion recognition sequence
KALDLVTGE

SEQ ID NO: 2899 - protein, 8 aa, Artificial Sequence
  Representative cyclic modulating agent based on Protocadherin cell adhesion recognition sequence
KFALDLVE

SEQ ID NO: 2900 - protein, 9 aa, Artificial Sequence
  Representative cyclic modulating agent based on Protocadherin cell adhesion recognition sequence
KFALDLVTE

SEQ ID NO: 2901 - protein, 10 aa, Artificial Sequence
  Representative cyclic modulating agent based on Protocadherin cell adhesion recognition sequence
KFALDLVTGE

SEQ ID NO: 2902 - protein, 9 aa, Artificial Sequence
  Representative cyclic modulating agent based on Protocadherin cell adhesion recognition sequence
KLFALDLVE

SEQ ID NO: 2903 - protein, 10 aa, Artificial Sequence
  Representative cyclic modulating agent based on Protocadherin cell adhesion recognition sequence
KLFALDLVTE

SEQ ID NO: 2904 - protein, 11 aa, Artificial Sequence
  Representative cyclic modulating agent based on Protocadherin cell adhesion recognition sequence
KLFALDLVTGE

SEQ ID NO: 2905 - protein, 5 aa, Artificial Sequence
  Representative cyclic modulating agent based on Protocadherin cell adhesion recognition sequence
KNRDE

SEQ ID NO: 2906 - protein, 6 aa, Artificial Sequence
  Representative cyclic modulating agent based on Protocadherin cell adhesion recognition sequence
KNRDNE

SEQ ID NO: 2907 - protein, 7 aa, Artificial Sequence
  Representative cyclic modulating agent based on Protocadherin cell adhesion recognition sequence
KNRDNGE

SEQ ID NO: 2908 - protein, 6 aa, Artificial Sequence
  Representative cyclic modulating agent based on Protocadherin cell adhesion recognition sequence
KINRDE

SEQ ID NO: 2909 - protein, 7 aa, Artificial Sequence
  Representative cyclic modulating agent based on Protocadherin cell adhesion recognition sequence
KINRDNE

SEQ ID NO: 2910 - protein, 8 aa, Artificial Sequence
  Representative cyclic modulating agent based on Protocadherin cell adhesion recognition sequence
KINRDNGE

SEQ ID NO: 2911 - protein, 7 aa, Artificial Sequence
  Representative cyclic modulating agent based on Protocadherin cell adhesion recognition sequence
KTINRDE

SEQ ID NO: 2912 - protein, 8 aa, Artificial Sequence
  Representative cyclic modulating agent based on Protocadherin cell adhesion recognition sequence
KTINRDNE

SEQ ID NO: 2913 - protein, 9 aa, Artificial Sequence
  Representative cyclic modulating agent based on Protocadherin cell adhesion recognition sequence
KTINRDNGE

SEQ ID NO: 2914 - protein, 8 aa, Artificial Sequence
  Representative cyclic modulating agent based on Protocadherin cell adhesion recognition sequence
KFTINRDE

SEQ ID NO: 2915 - protein, 9 aa, Artificial Sequence
  Representative cyclic modulating agent based on Protocadherin cell adhesion recognition sequence
KFTINRDNE

SEQ ID NO: 2916 - protein, 10 aa, Artificial Sequence
  Representative cyclic modulating agent based on Protocadherin cell adhesion recognition sequence
KFTINRDNGE

SEQ ID NO: 2917 - protein, 9 aa, Artificial Sequence
  Representative cyclic modulating agent based on Protocadherin cell adhesion recognition sequence
KYFTINRDE

SEQ ID NO: 2918 - protein, 10 aa, Artificial Sequence
  Representative cyclic modulating agent based on Protocadherin cell adhesion recognition sequence
KYFTINRDNE

SEQ ID NO: 2919 - protein, 11 aa, Artificial Sequence
  Representative cyclic modulating agent based on Protocadherin cell adhesion recognition sequence
KYFTINRDNGE

SEQ ID NO: 2920 - protein, 5 aa, Artificial Sequence
  Representative cyclic modulating agent based on Protocadherin cell adhesion recognition sequence
KDPKE

SEQ ID NO: 2921 - protein, 6 aa, Artificial Sequence
  Representative cyclic modulating agent based on Protocadherin cell adhesion recognition sequence
KDPKTE

SEQ ID NO: 2922 - protein, 7 aa, Artificial Sequence
  Representative cyclic modulating agent based on Protocadherin cell adhesion recognition sequence
KDPKTGE

SEQ ID NO: 2923 - protein, 6 aa, Artificial Sequence
  Representative cyclic modulating agent based on Protocadherin cell adhesion recognition sequence
KIDPKE

SEQ ID NO: 2924 - protein, 7 aa, Artificial Sequence
  Representative cyclic modulating agent based on Protocadherin cell adhesion recognition sequence
KIDPKTE

SEQ ID NO: 2925 - protein, 8 aa, Artificial Sequence
  Representative cyclic modulating agent based on Protocadherin cell adhesion recognition sequence
KIDPKTGE

SEQ ID NO: 2926 - protein, 7 aa, Artificial Sequence
  Representative cyclic modulating agent based on Protocadherin cell adhesion recognition sequence
KSIDPKE

SEQ ID NO: 2927 - protein, 8 aa, Artificial Sequence
  Representative cyclic modulating agent based on Protocadherin cell adhesion recognition sequence
KSIDPKTE

SEQ ID NO: 2928 - protein, 9 aa, Artificial Sequence
  Representative cyclic modulating agent based on Protocadherin cell adhesion recognition sequence
KSIDPKTGE

SEQ ID NO: 2929 - protein, 8 aa, Artificial Sequence
  Representative cyclic modulating agent based on Protocadherin cell adhesion recognition sequence
KFSIDPKE

SEQ ID NO: 2930 - protein, 9 aa, Artificial Sequence
  Representative cyclic modulating agent based on Protocadherin cell adhesion recognition sequence
KFSIDPKTE

SEQ ID NO: 2931 - protein, 10 aa, Artificial Sequence
  Representative cyclic modulating agent based on Protocadherin cell adhesion recognition sequence
KFSIDPKTGE

SEQ ID NO: 2932 - protein, 9 aa, Artificial Sequence
  Representative cyclic modulating agent based on Protocadherin cell adhesion recognition sequence
KLFSIDPKE

SEQ ID NO: 2933 - protein, 10 aa, Artificial Sequence
  Representative cyclic modulating agent based on Protocadherin cell adhesion recognition sequence
KLFSIDPKTE

SEQ ID NO: 2934 - protein, 11 aa, Artificial Sequence
  Representative cyclic modulating agent based on Protocadherin cell adhesion recognition sequence
KLFSIDPKTGE

SEQ ID NO: 2935 - protein, 5 aa, Artificial Sequence
  Representative cyclic modulating agent based on Protocadherin cell adhesion recognition sequence
KDPSE

SEQ ID NO: 2936 - protein, 6 aa, Artificial Sequence
  Representative cyclic modulating agent based on Protocadherin cell adhesion recognition sequence
KDPSSE

SEQ ID NO: 2937 - protein, 7 aa, Artificial Sequence
  Representative cyclic modulating agent based on Protocadherin cell adhesion recognition sequence
KDPSSGE

SEQ ID NO: 2938 - protein, 6 aa, Artificial Sequence
  Representative cyclic modulating agent based on Protocadherin cell adhesion recognition sequence
KIDPSE

SEQ ID NO: 2939 - protein, 7 aa, Artificial Sequence
  Representative cyclic modulating agent based on Protocadherin cell adhesion recognition sequence
KIDPSSE

SEQ ID NO: 2940 - protein, 8 aa, Artificial Sequence
  Representative cyclic modulating agent based on Protocadherin cell adhesion recognition sequence
KIDPSSGE

SEQ ID NO: 2941 - protein, 7 aa, Artificial Sequence
  Representative cyclic modulating agent based on Protocadherin cell adhesion recognition sequence
KEIDPSE

SEQ ID NO: 2942 - protein, 8 aa, Artificial Sequence
  Representative cyclic modulating agent based on Protocadherin cell adhesion recognition sequence
KEIDPSSE

SEQ ID NO: 2943 - protein, 9 aa, Artificial Sequence
  Representative cyclic modulating agent based on Protocadherin cell adhesion recognition sequence
KEIDPSSGE

SEQ ID NO: 2944 - protein, 8 aa, Artificial Sequence
  Representative cyclic modulating agent based on Protocadherin cell adhesion recognition sequence
KFEIDPSE

SEQ ID NO: 2945 - protein, 9 aa, Artificial Sequence
  Representative cyclic modulating agent based on Protocadherin cell adhesion recognition sequence
KFEIDPSSE

SEQ ID NO: 2946 - protein, 10 aa, Artificial Sequence
  Representative cyclic modulating agent based on Protocadherin cell adhesion recognition sequence
DLFIINENTK

SEQ ID NO: 2947 - protein, 7 aa, Artificial Sequence
  Representative cyclic modulating agent based on Protocadherin cell adhesion recognition sequence
DNENTGK

SEQ ID NO: 2948 - protein, 10 aa, Artificial Sequence
  Representative cyclic modulating agent based on Protocadherin cell adhesion recognition sequence
DINENTHEGK

SEQ ID NO: 2949 - protein, 10 aa, Artificial Sequence
  Representative cyclic modulating agent based on Protocadherin cell adhesion recognition sequence
KFEIDPSSGE

SEQ ID NO: 2950 - protein, 9 aa, Artificial Sequence
  Representative cyclic modulating agent based on Protocadherin cell adhesion recognition sequence
KLFEIDPSE

SEQ ID NO: 2951 - protein, 10 aa, Artificial Sequence
  Representative cyclic modulating agent based on Protocadherin cell adhesion recognition sequence
KLFEIDPSSE

SEQ ID NO: 2952 - protein, 11 aa, Artificial Sequence
  Representative cyclic modulating agent based on Protocadherin cell adhesion recognition sequence
KLFEIDPSSGE

SEQ ID NO: 2953 - protein, 5 aa, Artificial Sequence
  Representative cyclic modulating agent based on Protocadherin cell adhesion recognition sequence
DDLVK

SEQ ID NO: 2954 - protein, 6 aa, Artificial Sequence
  Representative cyclic modulating agent based on Protocadherin cell adhesion recognition sequence
DDLVTK

SEQ ID NO: 2955 - protein, 7 aa, Artificial Sequence
  Representative cyclic modulating agent based on Protocadherin cell adhesion recognition sequence
DDLVTGK

SEQ ID NO: 2956 - protein, 6 aa, Artificial Sequence
  Representative cyclic modulating agent based on Protocadherin cell adhesion recognition sequence
DLDLVK

SEQ ID NO: 2957 - protein, 7 aa, Artificial Sequence
  Representative cyclic modulating agent based on Protocadherin cell adhesion recognition sequence
DLDLVTK

SEQ ID NO: 2958 - protein, 8 aa, Artificial Sequence
  Representative cyclic modulating agent based on Protocadherin cell adhesion recognition sequence
DLDLVTGK

SEQ ID NO: 2959 - protein, 7 aa, Artificial Sequence
  Representative cyclic modulating agent based on Protocadherin cell adhesion recognition sequence
DALDLVK

SEQ ID NO: 2960 - protein, 8 aa, Artificial Sequence
  Representative cyclic modulating agent based on Protocadherin cell adhesion recognition sequence
DALDLVTK

SEQ ID NO: 2961 - protein, 9 aa, Artificial Sequence
  Representative cyclic modulating agent based on Protocadherin cell adhesion recognition sequence
DALDLVTGK

SEQ ID NO: 2962 - protein, 8 aa, Artificial Sequence
  Representative cyclic modulating agent based on Protocadherin cell adhesion recognition sequence
DFALDLVK

SEQ ID NO: 2963 - protein, 9 aa, Artificial Sequence
  Representative cyclic modulating agent based on Protocadherin cell adhesion recognition sequence
DFALDLVTK

SEQ ID NO: 2964 - protein, 10 aa, Artificial Sequence
  Representative cyclic modulating agent based on Protocadherin cell adhesion recognition sequence
DFALDLVTGK

SEQ ID NO: 2965 - protein, 9 aa, Artificial Sequence
  Representative cyclic modulating agent based on Protocadherin cell adhesion recognition sequence
DLFALDLVK

SEQ ID NO: 2966 - protein, 10 aa, Artificial Sequence
  Representative cyclic modulating agent based on Protocadherin cell adhesion recognition sequence
DLFALDLVTK

SEQ ID NO: 2967 - protein, 11 aa, Artificial Sequence
  Representative cyclic modulating agent based on Protocadherin cell adhesion recognition sequence
DLFALDLVTGK

SEQ ID NO: 2968 - protein, 5 aa, Artificial Sequence
  Representative cyclic modulating agent based on Protocadherin cell adhesion recognition sequence
DNRDK

SEQ ID NO: 2969 - protein, 6 aa, Artificial Sequence
  Representative cyclic modulating agent based on Protocadherin cell adhesion recognition sequence
DNRDNK

SEQ ID NO: 2970 - protein, 7 aa, Artificial Sequence
  Representative cyclic modulating agent based on Protocadherin cell adhesion recognition sequence
DNRDNGK

SEQ ID NO: 2971 - protein, 6 aa, Artificial Sequence
  Representative cyclic modulating agent based on Protocadherin cell adhesion recognition sequence
DINRDK

SEQ ID NO: 2972 - protein, 7 aa, Artificial Sequence
  Representative cyclic modulating agent based on Protocadherin cell adhesion recognition sequence
DINRDNK

SEQ ID NO: 2973 - protein, 8 aa, Artificial Sequence
  Representative cyclic modulating agent based on Protocadherin cell adhesion recognition sequence
DINRDNGK

SEQ ID NO: 2974 - protein, 7 aa, Artificial Sequence
  Representative cyclic modulating agent based on Protocadherin cell adhesion recognition sequence
DTINRDK

SEQ ID NO: 2975 - protein, 8 aa, Artificial Sequence
  Representative cyclic modulating agent based on Protocadherin cell adhesion recognition sequence
DTINRDNK

SEQ ID NO: 2976 - protein, 9 aa, Artificial Sequence
  Representative cyclic modulating agent based on Protocadherin cell adhesion recognition sequence
DTINRDNGK

SEQ ID NO: 2977 - protein, 8 aa, Artificial Sequence
  Representative cyclic modulating agent based on Protocadherin cell adhesion recognition sequence
DFTINRDK

SEQ ID NO: 2978 - protein, 9 aa, Artificial Sequence
  Representative cyclic modulating agent based on Protocadherin cell adhesion recognition sequence
DFTINRDNK

SEQ ID NO: 2979 - protein, 10 aa, Artificial Sequence
  Representative cyclic modulating agent based on Protocadherin cell adhesion recognition sequence
DFTINRDNGK

SEQ ID NO: 2980 - protein, 9 aa, Artificial Sequence
  Representative cyclic modulating agent based on Protocadherin cell adhesion recognition sequence
DYFTINRDK

SEQ ID NO: 2981 - protein, 10 aa, Artificial Sequence
  Representative cyclic modulating agent based on Protocadherin cell adhesion recognition sequence
DYFTINRDNK

SEQ ID NO: 2982 - protein, 11 aa, Artificial Sequence
  Representative cyclic modulating agent based on Protocadherin cell adhesion recognition sequence
DYFTINRDNGK

SEQ ID NO: 2983 - protein, 5 aa, Artificial Sequence
  Representative cyclic modulating agent based on Protocadherin cell adhesion recognition sequence
DDPKK

SEQ ID NO: 2984 - protein, 6 aa, Artificial Sequence
  Representative cyclic modulating agent based on Protocadherin cell adhesion recognition sequence
DDPKTK

SEQ ID NO: 2985 - protein, 7 aa, Artificial Sequence
  Representative cyclic modulating agent based on Protocadherin cell adhesion recognition sequence
DDPKTGK

SEQ ID NO: 2986 - protein, 6 aa, Artificial Sequence
  Representative cyclic modulating agent based on Protocadherin cell adhesion recognition sequence
DIDPKK

SEQ ID NO: 2987 - protein, 7 aa, Artificial Sequence
  Representative cyclic modulating agent based on Protocadherin cell adhesion recognition sequence
DIDPKTK

SEQ ID NO: 2988 - protein, 8 aa, Artificial Sequence
  Representative cyclic modulating agent based on Protocadherin cell adhesion recognition sequence
DIDPKTGD

SEQ ID NO: 2989 - protein, 7 aa, Artificial Sequence
  Representative cyclic modulating agent based on Protocadherin cell adhesion recognition sequence
DSIDPKK

SEQ ID NO: 2990 - protein, 8 aa, Artificial Sequence
  Representative cyclic modulating agent based on Protocadherin cell adhesion recognition sequence
DSIDPKTK

SEQ ID NO: 2991 - protein, 9 aa, Artificial Sequence
  Representative cyclic modulating agent based on Protocadherin cell adhesion recognition sequence
DSIDPKTGK

SEQ ID NO: 2992 - protein, 8 aa, Artificial Sequence
  Representative cyclic modulating agent based on Protocadherin cell adhesion recognition sequence
DFSIDPKK

SEQ ID NO: 2993 - protein, 9 aa, Artificial Sequence
  Representative cyclic modulating agent based on Protocadherin cell adhesion recognition sequence
DFSIDPKTK

SEQ ID NO: 2994 - protein, 10 aa, Artificial Sequence
  Representative cyclic modulating agent based on Protocadherin cell adhesion recognition sequence
DFSIDPKTGK

SEQ ID NO: 2995 - protein, 9 aa, Artificial Sequence
  Representative cyclic modulating agent based on Protocadherin cell adhesion recognition sequence
DLFSIDPKK

SEQ ID NO: 2996 - protein, 10 aa, Artificial Sequence
  Representative cyclic modulating agent based on Protocadherin cell adhesion recognition sequence
DLFSIDPKTK

SEQ ID NO: 2997 - protein, 11 aa, Artificial Sequence
  Representative cyclic modulating agent based on Protocadherin cell adhesion recognition sequence
DLFSIDPKTGK

SEQ ID NO: 2998 - protein, 5 aa, Artificial Sequence
  Representative cyclic modulating agent based on Protocadherin cell adhesion recognition sequence
DDPSK

SEQ ID NO: 2999 - protein, 6 aa, Artificial Sequence
  Representative cyclic modulating agent based on Protocadherin cell adhesion recognition sequence
DDPSSK

SEQ ID NO: 3000 - protein, 7 aa, Artificial Sequence
  Representative cyclic modulating agent based on Protocadherin cell adhesion recognition sequence
DDPSSGK

SEQ ID NO: 3001 - protein, 6 aa, Artificial Sequence
  Representative cyclic modulating agent based on Protocadherin cell adhesion recognition sequence
DIDPSK

SEQ ID NO: 3002 - protein, 7 aa, Artificial Sequence
  Representative cyclic modulating agent based on Protocadherin cell adhesion recognition sequence
DIDPSSK

SEQ ID NO: 3003 - protein, 8 aa, Artificial Sequence
  Representative cyclic modulating agent based on Protocadherin cell adhesion recognition sequence
DIDPSSGK

SEQ ID NO: 3004 - protein, 7 aa, Artificial Sequence
  Representative cyclic modulating agent based on Protocadherin cell adhesion recognition sequence
DEIDPSK

SEQ ID NO: 3005 - protein, 8 aa, Artificial Sequence
  Representative cyclic modulating agent based on Protocadherin cell adhesion recognition sequence
DEIDPSSK

SEQ ID NO: 3006 - protein, 9 aa, Artificial Sequence
  Representative cyclic modulating agent based on Protocadherin cell adhesion recognition sequence
DEIDPSSGK

SEQ ID NO: 3007 - protein, 8 aa, Artificial Sequence
  Representative cyclic modulating agent based on Protocadherin cell adhesion recognition sequence
DFEIDPSK

SEQ ID NO: 3008 - protein, 9 aa, Artificial Sequence
  Representative cyclic modulating agent based on Protocadherin cell adhesion recognition sequence
DFEIDPSSK

SEQ ID NO: 3009 - protein, 9 aa, Artificial Sequence
  Representative cyclic modulating agent based on Protocadherin cell adhesion recognition sequence
DIINENTGK

SEQ ID NO: 3010 - protein, 10 aa, Artificial Sequence
  Representative cyclic modulating agent based on Protocadherin cell adhesion recognition sequence
DFIINENTGK

SEQ ID NO: 3011 - protein, 11 aa, Artificial Sequence
  Representative cyclic modulating agent based on Protocadherin cell adhesion recognition sequence
DLFIINENTGK

SEQ ID NO: 3012 - protein, 10 aa, Artificial Sequence
  Representative cyclic modulating agent based on Protocadherin cell adhesion recognition sequence
DFEIDPSSGK

SEQ ID NO: 3013 - protein, 9 aa, Artificial Sequence
  Representative cyclic modulating agent based on Protocadherin cell adhesion recognition sequence
DLFEIDPSK

SEQ ID NO: 3014 - protein, 10 aa, Artificial Sequence
  Representative cyclic modulating agent based on Protocadherin cell adhesion recognition sequence
DLFEIDPSSK

SEQ ID NO: 3015 - protein, 11 aa, Artificial Sequence
  Representative cyclic modulating agent based on Protocadherin cell adhesion recognition sequence
DLFEIDPSSGK

SEQ ID NO: 3016 - protein, 5 aa, Artificial Sequence
  Representative cyclic modulating agent based on Protocadherin cell adhesion recognition sequence
DLVTG

SEQ ID NO: 3017 - protein, 5 aa, Artificial Sequence
  Representative cyclic modulating agent based on Protocadherin cell adhesion recognition sequence
LDLVT

SEQ ID NO: 3018 - protein, 6 aa, Artificial Sequence
  Representative cyclic modulating agent based on Protocadherin cell adhesion recognition sequence
LDLVTG

SEQ ID NO: 3019 - protein, 5 aa, Artificial Sequence
  Representative cyclic modulating agent based on Protocadherin cell adhesion recognition sequence
ALDLV

SEQ ID NO: 3020 - protein, 6 aa, Artificial Sequence
  Representative cyclic modulating agent based on Protocadherin cell adhesion recognition sequence
ALDLVT

SEQ ID NO: 3021 - protein, 7 aa, Artificial Sequence
  Representative cyclic modulating agent based on Protocadherin cell adhesion recognition sequence
ALDLVTG

SEQ ID NO: 3022 - protein, 6 aa, Artificial Sequence
  Representative cyclic modulating agent based on Protocadherin cell adhesion recognition sequence
FALDLV

SEQ ID NO: 3023 - protein, 8 aa, Artificial Sequence
  Representative cyclic modulating agent based on Protocadherin cell adhesion recognition sequence
FALDLVTC

SEQ ID NO: 3024 - protein, 8 aa, Artificial Sequence
  Representative cyclic modulating agent based on Protocadherin cell adhesion recognition sequence
FALDLVTG

SEQ ID NO: 3025 - protein, 7 aa, Artificial Sequence
  Representative cyclic modulating agent based on Protocadherin cell adhesion recognition sequence
LFALDLV

SEQ ID NO: 3026 - protein, 8 aa, Artificial Sequence
  Representative cyclic modulating agent based on Protocadherin cell adhesion recognition sequence
LFALDLVT

SEQ ID NO: 3027 - protein, 9 aa, Artificial Sequence
  Representative cyclic modulating agent based on Protocadherin cell adhesion recognition sequence
LFALDLVTG

SEQ ID NO: 3028 - protein, 5 aa, Artificial Sequence
  Representative cyclic modulating agent based on Protocadherin cell adhesion recognition sequence
NRDNG

SEQ ID NO: 3029 - protein, 5 aa, Artificial Sequence
  Representative cyclic modulating agent based on Protocadherin cell adhesion recognition sequence
INRDN

SEQ ID NO: 3030 - protein, 6 aa, Artificial Sequence
  Representative cyclic modulating agent based on Protocadherin cell adhesion recognition sequence
INRDNG

SEQ ID NO: 3031 - protein, 5 aa, Artificial Sequence
  Representative cyclic modulating agent based on Protocadherin cell adhesion recognition sequence
TINRD

SEQ ID NO: 3032 - protein, 6 aa, Artificial Sequence
  Representative cyclic modulating agent based on Protocadherin cell adhesion recognition sequence
TINRDN

SEQ ID NO: 3033 - protein, 7 aa, Artificial Sequence
  Representative cyclic modulating agent based on Protocadherin cell adhesion recognition sequence
TINRDNG

SEQ ID NO: 3034 - protein, 6 aa, Artificial Sequence
  Representative cyclic modulating agent based on Protocadherin cell adhesion recognition sequence
FTINRD

SEQ ID NO: 3035 - protein, 7 aa, Artificial Sequence
  Representative cyclic modulating agent based on Protocadherin cell adhesion recognition sequence
FTINRDN

SEQ ID NO: 3036 - protein, 8 aa, Artificial Sequence
  Representative cyclic modulating agent based on Protocadherin cell adhesion recognition sequence
FTINRDNG

SEQ ID NO: 3037 - protein, 7 aa, Artificial Sequence
  Representative cyclic modulating agent based on Protocadherin cell adhesion recognition sequence
YFTINRD

SEQ ID NO: 3038 - protein, 8 aa, Artificial Sequence
  Representative cyclic modulating agent based on Protocadherin cell adhesion recognition sequence
YFTINRDN

SEQ ID NO: 3039 - protein, 9 aa, Artificial Sequence
  Representative cyclic modulating agent based on Protocadherin cell adhesion recognition sequence
YFTINRDNG

SEQ ID NO: 3040 - protein, 5 aa, Artificial Sequence
  Representative cyclic modulating agent based on Protocadherin cell adhesion recognition sequence
DPKTG

SEQ ID NO: 3041 - protein, 5 aa, Artificial Sequence
  Representative cyclic modulating agent based on Protocadherin cell adhesion recognition sequence
IDPKT

SEQ ID NO: 3042 - protein, 6 aa, Artificial Sequence
  Representative cyclic modulating agent based on Protocadherin cell adhesion recognition sequence
IDPKTG

SEQ ID NO: 3043 - protein, 5 aa, Artificial Sequence
  Representative cyclic modulating agent based on Protocadherin cell adhesion recognition sequence
SIDPK

SEQ ID NO: 3044 - protein, 6 aa, Artificial Sequence
  Representative cyclic modulating agent based on Protocadherin cell adhesion recognition sequence
SIDPKT

SEQ ID NO: 3045 - protein, 7 aa, Artificial Sequence
  Representative cyclic modulating agent based on Protocadherin cell adhesion recognition sequence
SIDPKTG

SEQ ID NO: 3046 - protein, 6 aa, Artificial Sequence
  Representative cyclic modulating agent based on Protocadherin cell adhesion recognition sequence
FSIDPK

SEQ ID NO: 3047 - protein, 7 aa, Artificial Sequence
  Representative cyclic modulating agent based on Protocadherin cell adhesion recognition sequence
FSIDPKT

SEQ ID NO: 3048 - protein, 8 aa, Artificial Sequence
  Representative cyclic modulating agent based on Protocadherin cell adhesion recognition sequence
FSIDPKTG

SEQ ID NO: 3049 - protein, 7 aa, Artificial Sequence
  Representative cyclic modulating agent based on Protocadherin cell adhesion recognition sequence
LFSIDPK

SEQ ID NO: 3050 - protein, 8 aa, Artificial Sequence
  Representative cyclic modulating agent based on Protocadherin cell adhesion recognition sequence
LFSIDPKT

SEQ ID NO: 3051 - protein, 9 aa, Artificial Sequence
  Representative cyclic modulating agent based on Protocadherin cell adhesion recognition sequence
LFSIDPKTG

SEQ ID NO: 3052 - protein, 5 aa, Artificial Sequence
  Representative cyclic modulating agent based on Protocadherin cell adhesion recognition sequence
DPSSG

SEQ ID NO: 3053 - protein, 5 aa, Artificial Sequence
  Representative cyclic modulating agent based on Protocadherin cell adhesion recognition sequence
IDPSS

SEQ ID NO: 3054 - protein, 6 aa, Artificial Sequence
  Representative cyclic modulating agent based on Protocadherin cell adhesion recognition sequence
IDPSSG

SEQ ID NO: 3055 - protein, 6 aa, Artificial Sequence
  Representative cyclic modulating agent based on Protocadherin cell adhesion recognition sequence
ENENTK

SEQ ID NO: 3056 - protein, 6 aa, Artificial Sequence
  Representative cyclic modulating agent based on Protocadherin cell adhesion recognition sequence
EIDPSS

SEQ ID NO: 3057 - protein, 7 aa, Artificial Sequence
  Representative cyclic modulating agent based on Protocadherin cell adhesion recognition sequence
EIDPSSG

SEQ ID NO: 3058 - protein, 6 aa, Artificial Sequence
  Representative cyclic modulating agent based on Protocadherin cell adhesion recognition sequence
FEIDPS

SEQ ID NO: 3059 - protein, 7 aa, Artificial Sequence
  Representative cyclic modulating agent based on Protocadherin cell adhesion recognition sequence
FEIDPSS

SEQ ID NO: 3060 - protein, 7 aa, Artificial Sequence
  Representative cyclic modulating agent based on Protocadherin cell adhesion recognition sequence
EIDPSSG

SEQ ID NO: 3061 - protein, 6 aa, Artificial Sequence
  Representative cyclic modulating agent based on Protocadherin cell adhesion recognition sequence
FEIDPS

SEQ ID NO: 3062 - protein, 8 aa, Artificial Sequence
  Representative cyclic modulating agent based on Protocadherin cell adhesion recognition sequence
FEIDPSSG

SEQ ID NO: 3063 - protein, 7 aa, Artificial Sequence
  Representative cyclic modulating agent based on Protocadherin cell adhesion recognition sequence
LFEIDPS

SEQ ID NO: 3064 - protein, 8 aa, Artificial Sequence
  Representative cyclic modulating agent based on Protocadherin cell adhesion recognition sequence
LFEIDPSS

SEQ ID NO: 3065 - protein, 9 aa, Artificial Sequence
  Representative cyclic modulating agent based on Protocadherin cell adhesion recognition sequence
LFEIDPSSG

SEQ ID NO: 3066 - protein, 5 aa, Artificial Sequence
  Representative cyclic modulating agent based on Desmoglein cell adhesion recognition sequence
CNQKC

SEQ ID NO: 3067 - protein, 6 aa, Artificial Sequence
  Representative cyclic modulating agent based on Desmoglein cell adhesion recognition sequence
CNQKTC

SEQ ID NO: 3068 - protein, 7 aa, Artificial Sequence
  Representative cyclic modulating agent based on Desmoglein cell adhesion recognition sequence
CNQKTGC

SEQ ID NO: 3069 - protein, 6 aa, Artificial Sequence
  Representative cyclic modulating agent based on Desmoglein cell adhesion recognition sequence
CINQKC

SEQ ID NO: 3070 - protein, 7 aa, Artificial Sequence
  Representative cyclic modulating agent based on Desmoglein cell adhesion recognition sequence
CINQKTC

SEQ ID NO: 3071 - protein, 8 aa, Artificial Sequence
  Representative cyclic modulating agent based on Desmoglein cell adhesion recognition sequence
CINQKTGC

SEQ ID NO: 3072 - protein, 7 aa, Artificial Sequence
  Representative cyclic modulating agent based on Desmoglein cell adhesion recognition sequence
CVINQKC

SEQ ID NO: 3073 - protein, 8 aa, Artificial Sequence
  Representative cyclic modulating agent based on Desmoglein cell adhesion recognition sequence
CVINQKTC

SEQ ID NO: 3074 - protein, 9 aa, Artificial Sequence
  Representative cyclic modulating agent based on Desmoglein cell adhesion recognition sequence
CVINQKTGC

SEQ ID NO: 3075 - protein, 8 aa, Artificial Sequence
  Representative cyclic modulating agent based on Desmoglein cell adhesion recognition sequence
CFVINQKC

SEQ ID NO: 3076 - protein, 9 aa, Artificial Sequence
  Representative cyclic modulating agent based on Desmoglein cell adhesion recognition sequence
CFVINQKTC

SEQ ID NO: 3077 - protein, 10 aa, Artificial Sequence
  Representative cyclic modulating agent based on Desmoglein cell adhesion recognition sequence
CFVINQKTGC

SEQ ID NO: 3078 - protein, 9 aa, Artificial Sequence
  Representative cyclic modulating agent based on Desmoglein cell adhesion recognition sequence
CIFVINQKC

SEQ ID NO: 3079 - protein, 10 aa, Artificial Sequence
  Representative cyclic modulating agent based on Desmoglein cell adhesion recognition sequence
CIFVINQKTC

SEQ ID NO: 3080 - protein, 11 aa, Artificial Sequence
  Representative cyclic modulating agent based on Desmoglein cell adhesion recognition sequence
CIFVINQKTGC

SEQ ID NO: 3081 - protein, 5 aa, Artificial Sequence
  Representative cyclic modulating agent based on Desmoglein cell adhesion recognition sequence
CNRNC

SEQ ID NO: 3082 - protein, 6 aa, Artificial Sequence
  Representative cyclic modulating agent based on Desmoglein cell adhesion recognition sequence
CNRNTC

SEQ ID NO: 3083 - protein, 7 aa, Artificial Sequence
  Representative cyclic modulating agent based on Desmoglein cell adhesion recognition sequence
CNRNTGC

SEQ ID NO: 3084 - protein, 6 aa, Artificial Sequence
  Representative cyclic modulating agent based on Desmoglein cell adhesion recognition sequence
CINRNC

SEQ ID NO: 3085 - protein, 7 aa, Artificial Sequence
  Representative cyclic modulating agent based on Desmoglein cell adhesion recognition sequence
CINRNTC

SEQ ID NO: 3086 - protein, 8 aa, Artificial Sequence
  Representative cyclic modulating agent based on Desmoglein cell adhesion recognition sequence
CINRNTGC

SEQ ID NO: 3087 - protein, 7 aa, Artificial Sequence
  Representative cyclic modulating agent based on Desmoglein cell adhesion recognition sequence
CIINRNC

SEQ ID NO: 3088 - protein, 8 aa, Artificial Sequence
  Representative cyclic modulating agent based on Desmoglein cell adhesion recognition sequence
CIINRNTC

SEQ ID NO: 3089 - protein, 9 aa, Artificial Sequence
  Representative cyclic modulating agent based on Desmoglein cell adhesion recognition sequence
CIINRNTGC

SEQ ID NO: 3090 - protein, 8 aa, Artificial Sequence
  Representative cyclic modulating agent based on Desmoglein cell adhesion recognition sequence
CFIINRNC

SEQ ID NO: 3091 - protein, 9 aa, Artificial Sequence
  Representative cyclic modulating agent based on Desmoglein cell adhesion recognition sequence
CFIINRNTC

SEQ ID NO: 3092 - protein, 10 aa, Artificial Sequence
  Representative cyclic modulating agent based on Desmoglein cell adhesion recognition sequence
CFIINRNTGC

SEQ ID NO: 3093 - protein, 9 aa, Artificial Sequence
  Representative cyclic modulating agent based on Desmoglein cell adhesion recognition sequence
CMFIINRNC

SEQ ID NO: 3094 - protein, 10 aa, Artificial Sequence
  Representative cyclic modulating agent based on Desmoglein cell adhesion recognition sequence
CMFIINRNTC

SEQ ID NO: 3095 - protein, 11 aa, Artificial Sequence
  Representative cyclic modulating agent based on Desmoglein cell adhesion recognition sequence
CMFIINRNTGC

SEQ ID NO: 3096 - protein, 5 aa, Artificial Sequence
  Representative cyclic modulating agent based on Desmoglein cell adhesion recognition sequence
CNKDC

SEQ ID NO: 3097 - protein, 6 aa, Artificial Sequence
  Representative cyclic modulating agent based on Desmoglein cell adhesion recognition sequence
CNKDTC

SEQ ID NO: 3098 - protein, 7 aa, Artificial Sequence
  Representative cyclic modulating agent based on Desmoglein cell adhesion recognition sequence
CNKDTGC

SEQ ID NO: 3099 - protein, 6 aa, Artificial Sequence
  Representative cyclic modulating agent based on Desmoglein cell adhesion recognition sequence
CLNKDC

SEQ ID NO: 3100 - protein, 7 aa, Artificial Sequence
  Representative cyclic modulating agent based on Desmoglein cell adhesion recognition sequence
CLNKDTC

SEQ ID NO: 3101 - protein, 8 aa, Artificial Sequence
  Representative cyclic modulating agent based on Desmoglein cell adhesion recognition sequence
CLNKDTGC

SEQ ID NO: 3102 - protein, 7 aa, Artificial Sequence
  Representative cyclic modulating agent based on Desmoglein cell adhesion recognition sequence
CYLNKDC

SEQ ID NO: 3103 - protein, 8 aa, Artificial Sequence
  Representative cyclic modulating agent based on Desmoglein cell adhesion recognition sequence
CYLNKDTC

SEQ ID NO: 3104 - protein, 9 aa, Artificial Sequence
  Representative cyclic modulating agent based on Desmoglein cell adhesion recognition sequence
CYLNKDTGC

SEQ ID NO: 3105 - protein, 8 aa, Artificial Sequence
  Representative cyclic modulating agent based on Desmoglein cell adhesion recognition sequence
CFYLNKDC

SEQ ID NO: 3106 - protein, 9 aa, Artificial Sequence
  Representative cyclic modulating agent based on Desmoglein cell adhesion recognition sequence
CFYLNKDTC

SEQ ID NO: 3107 - protein, 10 aa, Artificial Sequence
  Representative cyclic modulating agent based on Desmoglein cell adhesion recognition sequence
CFYLNKDTGC

SEQ ID NO: 3108 - protein, 9 aa, Artificial Sequence
  Representative cyclic modulating agent based on Desmoglein cell adhesion recognition sequence
CVFYLNKDC

SEQ ID NO: 3109 - protein, 10 aa, Artificial Sequence
  Representative cyclic modulating agent based on Desmoglein cell adhesion recognition sequence
CVFYLNKDTC

SEQ ID NO: 3110 - protein, 11 aa, Artificial Sequence
  Representative cyclic modulating agent based on Desmoglein cell adhesion recognition sequence
CVFYLNKDTGC

SEQ ID NO: 3111 - protein, 5 aa, Artificial Sequence
  Representative cyclic modulating agent based on Desmoglein cell adhesion recognition sequence
ENQKK

SEQ ID NO: 3112 - protein, 6 aa, Artificial Sequence
  Representative cyclic modulating agent based on Desmoglein cell adhesion recognition sequence
ENQKTK

SEQ ID NO: 3113 - protein, 7 aa, Artificial Sequence
  Representative cyclic modulating agent based on Desmoglein cell adhesion recognition sequence
ENQKTGK

SEQ ID NO: 3114 - protein, 6 aa, Artificial Sequence
  Representative cyclic modulating agent based on Desmoglein cell adhesion recognition sequence
EINQKK

SEQ ID NO: 3115 - protein, 7 aa, Artificial Sequence
  Representative cyclic modulating agent based on Desmoglein cell adhesion recognition sequence
EINQKTK

SEQ ID NO: 3116 - protein, 8 aa, Artificial Sequence
  Representative cyclic modulating agent based on Desmoglein cell adhesion recognition sequence
EINQKTGK

SEQ ID NO: 3117 - protein, 7 aa, Artificial Sequence
  Representative cyclic modulating agent based on Desmoglein cell adhesion recognition sequence
EVINQKK

SEQ ID NO: 3118 - protein, 8 aa, Artificial Sequence
  Representative cyclic modulating agent based on Desmoglein cell adhesion recognition sequence
EVINQKTK

SEQ ID NO: 3119 - protein, 9 aa, Artificial Sequence
  Representative cyclic modulating agent based on Desmoglein cell adhesion recognition sequence
EVINQKTGK

SEQ ID NO: 3120 - protein, 8 aa, Artificial Sequence
  Representative cyclic modulating agent based on Desmoglein cell adhesion recognition sequence
EFVINQKK

SEQ ID NO: 3121 - protein, 9 aa, Artificial Sequence
  Representative cyclic modulating agent based on Desmoglein cell adhesion recognition sequence
EFVINQKTK

SEQ ID NO: 3122 - protein, 10 aa, Artificial Sequence
  Representative cyclic modulating agent based on Desmoglein cell adhesion recognition sequence
EFVINQKTGK

SEQ ID NO: 3123 - protein, 9 aa, Artificial Sequence
  Representative cyclic modulating agent based on Desmoglein cell adhesion recognition sequence
EIFVINQKK

SEQ ID NO: 3124 - protein, 10 aa, Artificial Sequence
  Representative cyclic modulating agent based on Desmoglein cell adhesion recognition sequence
EIFVINQKTK

SEQ ID NO: 3125 - protein, 11 aa, Artificial Sequence
  Representative cyclic modulating agent based on Desmoglein cell adhesion recognition sequence
EIFVINQKTGK

SEQ ID NO: 3126 - protein, 5 aa, Artificial Sequence
  Representative cyclic modulating agent based on Desmoglein cell adhesion recognition sequence
ENRNK

SEQ ID NO: 3127 - protein, 6 aa, Artificial Sequence
  Representative cyclic modulating agent based on Desmoglein cell adhesion recognition sequence
ENRNTK

SEQ ID NO: 3128 - protein, 7 aa, Artificial Sequence
  Representative cyclic modulating agent based on Desmoglein cell adhesion recognition sequence
ENRNTGK

SEQ ID NO: 3129 - protein, 6 aa, Artificial Sequence
  Representative cyclic modulating agent based on Desmoglein cell adhesion recognition sequence
EINRNK

SEQ ID NO: 3130 - protein, 7 aa, Artificial Sequence
  Representative cyclic modulating agent based on Desmoglein cell adhesion recognition sequence
EINRNTK

SEQ ID NO: 3131 - protein, 8 aa, Artificial Sequence
  Representative cyclic modulating agent based on Desmoglein cell adhesion recognition sequence
EINRNTGK

SEQ ID NO: 3132 - protein, 7 aa, Artificial Sequence
  Representative cyclic modulating agent based on Desmoglein cell adhesion recognition sequence
EIINRNK

SEQ ID NO: 3133 - protein, 8 aa, Artificial Sequence
  Representative cyclic modulating agent based on Desmoglein cell adhesion recognition sequence
EIINRNTK

SEQ ID NO: 3134 - protein, 9 aa, Artificial Sequence
  Representative cyclic modulating agent based on Desmoglein cell adhesion recognition sequence
EIINRNTGK

SEQ ID NO: 3135 - protein, 8 aa, Artificial Sequence
  Representative cyclic modulating agent based on Desmoglein cell adhesion recognition sequence
EFIINRNK

SEQ ID NO: 3136 - protein, 9 aa, Artificial Sequence
  Representative cyclic modulating agent based on Desmoglein cell adhesion recognition sequence
EFIINRNTK

SEQ ID NO: 3137 - protein, 10 aa, Artificial Sequence
  Representative cyclic modulating agent based on Desmoglein cell adhesion recognition sequence
EFIINRNTGK

SEQ ID NO: 3138 - protein, 9 aa, Artificial Sequence
  Representative cyclic modulating agent based on Desmoglein cell adhesion recognition sequence
EMFIINRNK

SEQ ID NO: 3139 - protein, 10 aa, Artificial Sequence
  Representative cyclic modulating agent based on Desmoglein cell adhesion recognition sequence
EMFIINRNTK

SEQ ID NO: 3140 - protein, 11 aa, Artificial Sequence
  Representative cyclic modulating agent based on Desmoglein cell adhesion recognition sequence
EMFIINRNTGK

SEQ ID NO: 3141 - protein, 5 aa, Artificial Sequence
  Representative cyclic modulating agent based on Desmoglein cell adhesion recognition sequence
ENKDK

SEQ ID NO: 3142 - protein, 6 aa, Artificial Sequence
  Representative cyclic modulating agent based on Desmoglein cell adhesion recognition sequence
ENKDTK

SEQ ID NO: 3143 - protein, 7 aa, Artificial Sequence
  Representative cyclic modulating agent based on Desmoglein cell adhesion recognition sequence
ENKDTGK

SEQ ID NO: 3144 - protein, 6 aa, Artificial Sequence
  Representative cyclic modulating agent based on Desmoglein cell adhesion recognition sequence
ELNKDK

SEQ ID NO: 3145 - protein, 7 aa, Artificial Sequence
  Representative cyclic modulating agent based on Desmoglein cell adhesion recognition sequence
ELNKDTK

SEQ ID NO: 3146 - protein, 8 aa, Artificial Sequence
  Representative cyclic modulating agent based on Desmoglein cell adhesion recognition sequence
ELNKDTGK

SEQ ID NO: 3147 - protein, 7 aa, Artificial Sequence
  Representative cyclic modulating agent based on Desmoglein cell adhesion recognition sequence
EYLNKDK

SEQ ID NO: 3148 - protein, 8 aa, Artificial Sequence
  Representative cyclic modulating agent based on Desmoglein cell adhesion recognition sequence
EYLNKDTK

SEQ ID NO: 3149 - protein, 9 aa, Artificial Sequence
  Representative cyclic modulating agent based on Desmoglein cell adhesion recognition sequence
EYLNKDTGK

SEQ ID NO: 3150 - protein, 8 aa, Artificial Sequence
  Representative cyclic modulating agent based on Desmoglein cell adhesion recognition sequence
EFYLNKDK

SEQ ID NO: 3151 - protein, 9 aa, Artificial Sequence
  Representative cyclic modulating agent based on Desmoglein cell adhesion recognition sequence
EFYLNKDTK

SEQ ID NO: 3152 - protein, 10 aa, Artificial Sequence
  Representative cyclic modulating agent based on Desmoglein cell adhesion recognition sequence
EFYLNKDTGK

SEQ ID NO: 3153 - protein, 9 aa, Artificial Sequence
  Representative cyclic modulating agent based on Desmoglein cell adhesion recognition sequence
EVFYLNKDK

SEQ ID NO: 3154 - protein, 10 aa, Artificial Sequence
  Representative cyclic modulating agent based on Desmoglein cell adhesion recognition sequence
EVFYLNKDTK

SEQ ID NO: 3155 - protein, 11 aa, Artificial Sequence
  Representative cyclic modulating agent based on Desmoglein cell adhesion recognition sequence
EVFYLNKDTGK

SEQ ID NO: 3156 - protein, 5 aa, Artificial Sequence
  Representative cyclic modulating agent based on Desmoglein cell adhesion recognition sequence
KNQKD

SEQ ID NO: 3157 - protein, 6 aa, Artificial Sequence
  Representative cyclic modulating agent based on Desmoglein cell adhesion recognition sequence
KNQKTD

SEQ ID NO: 3158 - protein, 7 aa, Artificial Sequence
  Representative cyclic modulating agent based on Desmoglein cell adhesion recognition sequence
KNQKTGD

SEQ ID NO: 3159 - protein, 6 aa, Artificial Sequence
  Representative cyclic modulating agent based on Desmoglein cell adhesion recognition sequence
KINQKD

SEQ ID NO: 3160 - protein, 7 aa, Artificial Sequence
  Representative cyclic modulating agent based on Desmoglein cell adhesion recognition sequence
KINQKTD

SEQ ID NO: 3161 - protein, 8 aa, Artificial Sequence
  Representative cyclic modulating agent based on Desmoglein cell adhesion recognition sequence
KINQKTGD

SEQ ID NO: 3162 - protein, 7 aa, Artificial Sequence
  Representative cyclic modulating agent based on Desmoglein cell adhesion recognition sequence
KVINQKD

SEQ ID NO: 3163 - protein, 8 aa, Artificial Sequence
  Representative cyclic modulating agent based on Desmoglein cell adhesion recognition sequence
KVINQKTD

SEQ ID NO: 3164 - protein, 9 aa, Artificial Sequence
  Representative cyclic modulating agent based on Desmoglein cell adhesion recognition sequence
KVINQKTGD

SEQ ID NO: 3165 - protein, 8 aa, Artificial Sequence
  Representative cyclic modulating agent based on Desmoglein cell adhesion recognition sequence
KFVINQKD

SEQ ID NO: 3166 - protein, 9 aa, Artificial Sequence
  Representative cyclic modulating agent based on Desmoglein cell adhesion recognition sequence
KFVINQKTD

SEQ ID NO: 3167 - protein, 10 aa, Artificial Sequence
  Representative cyclic modulating agent based on Desmoglein cell adhesion recognition sequence
KFVINQKTGD

SEQ ID NO: 3168 - protein, 9 aa, Artificial Sequence
  Representative cyclic modulating agent based on Desmoglein cell adhesion recognition sequence
KIFVINQKD

SEQ ID NO: 3169 - protein, 10 aa, Artificial Sequence
  Representative cyclic modulating agent based on Desmoglein cell adhesion recognition sequence
KIFVINQKTD

SEQ ID NO: 3170 - protein, 11 aa, Artificial Sequence
  Representative cyclic modulating agent based on Desmoglein cell adhesion recognition sequence
KIFVINQKTGD

SEQ ID NO: 3171 - protein, 5 aa, Artificial Sequence
  Representative cyclic modulating agent based on Desmoglein cell adhesion recognition sequence
KNRND

SEQ ID NO: 3172 - protein, 6 aa, Artificial Sequence
  Representative cyclic modulating agent based on Desmoglein cell adhesion recognition sequence
KNRNTD

SEQ ID NO: 3173 - protein, 7 aa, Artificial Sequence
  Representative cyclic modulating agent based on Desmoglein cell adhesion recognition sequence
KNRNTGD

SEQ ID NO: 3174 - protein, 6 aa, Artificial Sequence
  Representative cyclic modulating agent based on Desmoglein cell adhesion recognition sequence
KINRND

SEQ ID NO: 3175 - protein, 7 aa, Artificial Sequence
  Representative cyclic modulating agent based on Desmoglein cell adhesion recognition sequence
KINRNTD

SEQ ID NO: 3176 - protein, 8 aa, Artificial Sequence
  Representative cyclic modulating agent based on Desmoglein cell adhesion recognition sequence
KINRNTGD

SEQ ID NO: 3177 - protein, 7 aa, Artificial Sequence
  Representative cyclic modulating agent based on Desmoglein cell adhesion recognition sequence
KIINRND

SEQ ID NO: 3178 - protein, 8 aa, Artificial Sequence
  Representative cyclic modulating agent based on Desmoglein cell adhesion recognition sequence
KIINRNTD

SEQ ID NO: 3179 - protein, 9 aa, Artificial Sequence
  Representative cyclic modulating agent based on Desmoglein cell adhesion recognition sequence
KIINRNTGD

SEQ ID NO: 3180 - protein, 8 aa, Artificial Sequence
  Representative cyclic modulating agent based on Desmoglein cell adhesion recognition sequence
KFIINRND

SEQ ID NO: 3181 - protein, 9 aa, Artificial Sequence
  Representative cyclic modulating agent based on Desmoglein cell adhesion recognition sequence
KFIINRNTD

SEQ ID NO: 3182 - protein, 10 aa, Artificial Sequence
  Representative cyclic modulating agent based on Desmoglein cell adhesion recognition sequence
KFIINRNTGD

SEQ ID NO: 3183 - protein, 9 aa, Artificial Sequence
  Representative cyclic modulating agent based on Desmoglein cell adhesion recognition sequence
KMFIINRND

SEQ ID NO: 3184 - protein, 10 aa, Artificial Sequence
  Representative cyclic modulating agent based on Desmoglein cell adhesion recognition sequence
KMFIINRNTD

SEQ ID NO: 3185 - protein, 11 aa, Artificial Sequence
  Representative cyclic modulating agent based on Desmoglein cell adhesion recognition sequence
KMFIINRNTGD

SEQ ID NO: 3186 - protein, 5 aa, Artificial Sequence
  Representative cyclic modulating agent based on Desmoglein cell adhesion recognition sequence
KNKDD

SEQ ID NO: 3187 - protein, 6 aa, Artificial Sequence
  Representative cyclic modulating agent based on Desmoglein cell adhesion recognition sequence
KNKDTD

SEQ ID NO: 3188 - protein, 7 aa, Artificial Sequence
  Representative cyclic modulating agent based on Desmoglein cell adhesion recognition sequence
KNKDTGD

SEQ ID NO: 3189 - protein, 6 aa, Artificial Sequence
  Representative cyclic modulating agent based on Desmoglein cell adhesion recognition sequence
KLNKDD

SEQ ID NO: 3190 - protein, 7 aa, Artificial Sequence
  Representative cyclic modulating agent based on Desmoglein cell adhesion recognition sequence
KLNKDTD

SEQ ID NO: 3191 - protein, 8 aa, Artificial Sequence
  Representative cyclic modulating agent based on Desmoglein cell adhesion recognition sequence
KLNKDTGD

SEQ ID NO: 3192 - protein, 7 aa, Artificial Sequence
  Representative cyclic modulating agent based on Desmoglein cell adhesion recognition sequence
KYLNKDD

SEQ ID NO: 3193 - protein, 8 aa, Artificial Sequence
  Representative cyclic modulating agent based on Desmoglein cell adhesion recognition sequence
KYLNKDTD

SEQ ID NO: 3194 - protein, 9 aa, Artificial Sequence
  Representative cyclic modulating agent based on Desmoglein cell adhesion recognition sequence
KYLNKDTGD

SEQ ID NO: 3195 - protein, 8 aa, Artificial Sequence
  Representative cyclic modulating agent based on Desmoglein cell adhesion recognition sequence
KFYLNKDD

SEQ ID NO: 3196 - protein, 9 aa, Artificial Sequence
  Representative cyclic modulating agent based on Desmoglein cell adhesion recognition sequence
KFYLNKDTD

SEQ ID NO: 3197 - protein, 10 aa, Artificial Sequence
  Representative cyclic modulating agent based on Desmoglein cell adhesion recognition sequence
KFYLNKDTGD

SEQ ID NO: 3198 - protein, 9 aa, Artificial Sequence
  Representative cyclic modulating agent based on Desmoglein cell adhesion recognition sequence
KVFYLNKDD

SEQ ID NO: 3199 - protein, 10 aa, Artificial Sequence
  Representative cyclic modulating agent based on Desmoglein cell adhesion recognition sequence
KVFYLNKDTD

SEQ ID NO: 3200 - protein, 11 aa, Artificial Sequence
  Representative cyclic modulating agent based on Desmoglein cell adhesion recognition sequence
KVFYLNKDTGD

SEQ ID NO: 3201 - protein, 5 aa, Artificial Sequence
  Representative cyclic modulating agent based on Desmoglein cell adhesion recognition sequence
DNQKK

SEQ ID NO: 3202 - protein, 6 aa, Artificial Sequence
  Representative cyclic modulating agent based on Desmoglein cell adhesion recognition sequence
DNQKTK

SEQ ID NO: 3203 - protein, 7 aa, Artificial Sequence
  Representative cyclic modulating agent based on Desmoglein cell adhesion recognition sequence
DNQKTGK

SEQ ID NO: 3204 - protein, 6 aa, Artificial Sequence
  Representative cyclic modulating agent based on Desmoglein cell adhesion recognition sequence
DINQKK

SEQ ID NO: 3205 - protein, 7 aa, Artificial Sequence
  Representative cyclic modulating agent based on Desmoglein cell adhesion recognition sequence
DINQKTK

SEQ ID NO: 3206 - protein, 8 aa, Artificial Sequence
  Representative cyclic modulating agent based on Desmoglein cell adhesion recognition sequence
DINQKTGK

SEQ ID NO: 3207 - protein, 7 aa, Artificial Sequence
  Representative cyclic modulating agent based on Desmoglein cell adhesion recognition sequence
DVINQKK

SEQ ID NO: 3208 - protein, 8 aa, Artificial Sequence
  Representative cyclic modulating agent based on Desmoglein cell adhesion recognition sequence
DVINQKTK

SEQ ID NO: 3209 - protein, 9 aa, Artificial Sequence
  Representative cyclic modulating agent based on Desmoglein cell adhesion recognition sequence
DVINQKTGK

SEQ ID NO: 3210 - protein, 8 aa, Artificial Sequence
  Representative cyclic modulating agent based on Desmoglein cell adhesion recognition sequence
DFVINQKK

SEQ ID NO: 3211 - protein, 9 aa, Artificial Sequence
  Representative cyclic modulating agent based on Desmoglein cell adhesion recognition sequence
DFVINQKTK

SEQ ID NO: 3212 - protein, 10 aa, Artificial Sequence
  Representative cyclic modulating agent based on Desmoglein cell adhesion recognition sequence
DFVINQKTGK

SEQ ID NO: 3213 - protein, 9 aa, Artificial Sequence
  Representative cyclic modulating agent based on Desmoglein cell adhesion recognition sequence
DIFVINQKK

SEQ ID NO: 3214 - protein, 10 aa, Artificial Sequence
  Representative cyclic modulating agent based on Desmoglein cell adhesion recognition sequence
DIFVINQKTK

SEQ ID NO: 3215 - protein, 11 aa, Artificial Sequence
  Representative cyclic modulating agent based on Desmoglein cell adhesion recognition sequence
DIFVINQKTGK

SEQ ID NO: 3216 - protein, 5 aa, Artificial Sequence
  Representative cyclic modulating agent based on Desmoglein cell adhesion recognition sequence
DNRNK

SEQ ID NO: 3217 - protein, 6 aa, Artificial Sequence
  Representative cyclic modulating agent based on Desmoglein cell adhesion recognition sequence
DNRNTK

SEQ ID NO: 3218 - protein, 7 aa, Artificial Sequence
  Representative cyclic modulating agent based on Desmoglein cell adhesion recognition sequence
DNRNTGK

SEQ ID NO: 3219 - protein, 6 aa, Artificial Sequence
  Representative cyclic modulating agent based on Desmoglein cell adhesion recognition sequence
DINRNK

SEQ ID NO: 3220 - protein, 7 aa, Artificial Sequence
  Representative cyclic modulating agent based on Desmoglein cell adhesion recognition sequence
DINRNTK

SEQ ID NO: 3221 - protein, 8 aa, Artificial Sequence
  Representative cyclic modulating agent based on Desmoglein cell adhesion recognition sequence
DINRNTGK

SEQ ID NO: 3222 - protein, 7 aa, Artificial Sequence
  Representative cyclic modulating agent based on Desmoglein cell adhesion recognition sequence
DIINRNK

SEQ ID NO: 3223 - protein, 8 aa, Artificial Sequence
  Representative cyclic modulating agent based on Desmoglein cell adhesion recognition sequence
DIINRNTK

SEQ ID NO: 3224 - protein, 9 aa, Artificial Sequence
  Representative cyclic modulating agent based on Desmoglein cell adhesion recognition sequence
DIINRNTGK

SEQ ID NO: 3225 - protein, 8 aa, Artificial Sequence
  Representative cyclic modulating agent based on Desmoglein cell adhesion recognition sequence
DFIINRNK

SEQ ID NO: 3226 - protein, 9 aa, Artificial Sequence
  Representative cyclic modulating agent based on Desmoglein cell adhesion recognition sequence
DFIINRNTK

SEQ ID NO: 3227 - protein, 10 aa, Artificial Sequence
  Representative cyclic modulating agent based on Desmoglein cell adhesion recognition sequence
DFIINRNTGK

SEQ ID NO: 3228 - protein, 9 aa, Artificial Sequence
  Representative cyclic modulating agent based on Desmoglein cell adhesion recognition sequence
DMFIINRNK

SEQ ID NO: 3229 - protein, 10 aa, Artificial Sequence
  Representative cyclic modulating agent based on Desmoglein cell adhesion recognition sequence
DMFIINRNTK

SEQ ID NO: 3230 - protein, 11 aa, Artificial Sequence
  Representative cyclic modulating agent based on Desmoglein cell adhesion recognition sequence
DMFIINRNTGK

SEQ ID NO: 3231 - protein, 5 aa, Artificial Sequence
  Representative cyclic modulating agent based on Desmoglein cell adhesion recognition sequence
DNKDK

SEQ ID NO: 3232 - protein, 6 aa, Artificial Sequence
  Representative cyclic modulating agent based on Desmoglein cell adhesion recognition sequence
DNKDTK

SEQ ID NO: 3233 - protein, 7 aa, Artificial Sequence
  Representative cyclic modulating agent based on Desmoglein cell adhesion recognition sequence
DNKDTGK

SEQ ID NO: 3234 - protein, 6 aa, Artificial Sequence
  Representative cyclic modulating agent based on Desmoglein cell adhesion recognition sequence
DLNKDK

SEQ ID NO: 3235 - protein, 7 aa, Artificial Sequence
  Representative cyclic modulating agent based on Desmoglein cell adhesion recognition sequence
DLNKDTK

SEQ ID NO: 3236 - protein, 8 aa, Artificial Sequence
  Representative cyclic modulating agent based on Desmoglein cell adhesion recognition sequence
DLNKDTGK

SEQ ID NO: 3237 - protein, 7 aa, Artificial Sequence
  Representative cyclic modulating agent based on Desmoglein cell adhesion recognition sequence
DYLNKDK

SEQ ID NO: 3238 - protein, 8 aa, Artificial Sequence
  Representative cyclic modulating agent based on Desmoglein cell adhesion recognition sequence
DYLNKDTK

SEQ ID NO: 3239 - protein, 9 aa, Artificial Sequence
  Representative cyclic modulating agent based on Desmoglein cell adhesion recognition sequence
DYLNKDTGK

SEQ ID NO: 3240 - protein, 8 aa, Artificial Sequence
  Representative cyclic modulating agent based on Desmoglein cell adhesion recognition sequence
DFYLNKDK

SEQ ID NO: 3241 - protein, 9 aa, Artificial Sequence
  Representative cyclic modulating agent based on Desmoglein cell adhesion recognition sequence
DFYLNKDTK

SEQ ID NO: 3242 - protein, 10 aa, Artificial Sequence
  Representative cyclic modulating agent based on Desmoglein cell adhesion recognition sequence
DFYLNKDTGK

SEQ ID NO: 3243 - protein, 9 aa, Artificial Sequence
  Representative cyclic modulating agent based on Desmoglein cell adhesion recognition sequence
DVFYLNKDK

SEQ ID NO: 3244 - protein, 10 aa, Artificial Sequence
  Representative cyclic modulating agent based on Desmoglein cell adhesion recognition sequence
DVFYLNKDTK

SEQ ID NO: 3245 - protein, 11 aa, Artificial Sequence
  Representative cyclic modulating agent based on Desmoglein cell adhesion recognition sequence
DVFYLNKDTGK

SEQ ID NO: 3246 - protein, 6 aa, Artificial Sequence
  Representative cyclic modulating agent based on Desmoglein cell adhesion recognition sequence
KKNQKE

SEQ ID NO: 3247 - protein, 6 aa, Artificial Sequence
  Representative cyclic modulating agent based on Desmoglein cell adhesion recognition sequence
KNQKTE

SEQ ID NO: 3248 - protein, 7 aa, Artificial Sequence
  Representative cyclic modulating agent based on Desmoglein cell adhesion recognition sequence
KNQKTGE

SEQ ID NO: 3249 - protein, 6 aa, Artificial Sequence
  Representative cyclic modulating agent based on Desmoglein cell adhesion recognition sequence
KINQKE

SEQ ID NO: 3250 - protein, 7 aa, Artificial Sequence
  Representative cyclic modulating agent based on Desmoglein cell adhesion recognition sequence
KINQKTE

SEQ ID NO: 3251 - protein, 8 aa, Artificial Sequence
  Representative cyclic modulating agent based on Desmoglein cell adhesion recognition sequence
KINQKTGE

SEQ ID NO: 3252 - protein, 7 aa, Artificial Sequence
  Representative cyclic modulating agent based on Desmoglein cell adhesion recognition sequence
KVINQKE

SEQ ID NO: 3253 - protein, 8 aa, Artificial Sequence
  Representative cyclic modulating agent based on Desmoglein cell adhesion recognition sequence
KVINQKTE

SEQ ID NO: 3254 - protein, 9 aa, Artificial Sequence
  Representative cyclic modulating agent based on Desmoglein cell adhesion recognition sequence
KVINQKTGE

SEQ ID NO: 3255 - protein, 8 aa, Artificial Sequence
  Representative cyclic modulating agent based on Desmoglein cell adhesion recognition sequence
KFVINQKE

SEQ ID NO: 3256 - protein, 9 aa, Artificial Sequence
  Representative cyclic modulating agent based on Desmoglein cell adhesion recognition sequence
KFVINQKTE

SEQ ID NO: 3257 - protein, 10 aa, Artificial Sequence
  Representative cyclic modulating agent based on Desmoglein cell adhesion recognition sequence
KFVINQKTGE

SEQ ID NO: 3258 - protein, 9 aa, Artificial Sequence
  Representative cyclic modulating agent based on Desmoglein cell adhesion recognition sequence
KIFVINQKE

SEQ ID NO: 3259 - protein, 10 aa, Artificial Sequence
  Representative cyclic modulating agent based on Desmoglein cell adhesion recognition sequence
KIFVINQKTE

SEQ ID NO: 3260 - protein, 11 aa, Artificial Sequence
  Representative cyclic modulating agent based on Desmoglein cell adhesion recognition sequence
KIFVINQKTGE

SEQ ID NO: 3261 - protein, 5 aa, Artificial Sequence
  Representative cyclic modulating agent based on Desmoglein cell adhesion recognition sequence
KNRNE

SEQ ID NO: 3262 - protein, 6 aa, Artificial Sequence
  Representative cyclic modulating agent based on Desmoglein cell adhesion recognition sequence
KNRNTE

SEQ ID NO: 3263 - protein, 7 aa, Artificial Sequence
  Representative cyclic modulating agent based on Desmoglein cell adhesion recognition sequence
KNRNTGE

SEQ ID NO: 3264 - protein, 6 aa, Artificial Sequence
  Representative cyclic modulating agent based on Desmoglein cell adhesion recognition sequence
KINRNE

SEQ ID NO: 3265 - protein, 7 aa, Artificial Sequence
  Representative cyclic modulating agent based on Desmoglein cell adhesion recognition sequence
KINRNTE

SEQ ID NO: 3266 - protein, 8 aa, Artificial Sequence
  Representative cyclic modulating agent based on Desmoglein cell adhesion recognition sequence
KINRNTGE

SEQ ID NO: 3267 - protein, 7 aa, Artificial Sequence
  Representative cyclic modulating agent based on Desmoglein cell adhesion recognition sequence
KIINRNE

SEQ ID NO: 3268 - protein, 8 aa, Artificial Sequence
  Representative cyclic modulating agent based on Desmoglein cell adhesion recognition sequence
KIINRNTE

SEQ ID NO: 3269 - protein, 9 aa, Artificial Sequence
  Representative cyclic modulating agent based on Desmoglein cell adhesion recognition sequence
KIINRNTGE

SEQ ID NO: 3270 - protein, 8 aa, Artificial Sequence
  Representative cyclic modulating agent based on Desmoglein cell adhesion recognition sequence
KFIINRNE

SEQ ID NO: 3271 - protein, 9 aa, Artificial Sequence
  Representative cyclic modulating agent based on Desmoglein cell adhesion recognition sequence
KFIINRNTE

SEQ ID NO: 3272 - protein, 10 aa, Artificial Sequence
  Representative cyclic modulating agent based on Desmoglein cell adhesion recognition sequence
KFIINRNTGE

SEQ ID NO: 3273 - protein, 9 aa, Artificial Sequence
  Representative cyclic modulating agent based on Desmoglein cell adhesion recognition sequence
KMFIINRNE

SEQ ID NO: 3274 - protein, 10 aa, Artificial Sequence
  Representative cyclic modulating agent based on Desmoglein cell adhesion recognition sequence
KMFIINRNTE

SEQ ID NO: 3275 - protein, 11 aa, Artificial Sequence
  Representative cyclic modulating agent based on Desmoglein cell adhesion recognition sequence
KMFIINRNTGE

SEQ ID NO: 3276 - protein, 5 aa, Artificial Sequence
  Representative cyclic modulating agent based on Desmoglein cell adhesion recognition sequence
KNKDE

SEQ ID NO: 3277 - protein, 6 aa, Artificial Sequence
  Representative cyclic modulating agent based on Desmoglein cell adhesion recognition sequence
KNKDTE

SEQ ID NO: 3278 - protein, 7 aa, Artificial Sequence
  Representative cyclic modulating agent based on Desmoglein cell adhesion recognition sequence
KNKDTGE

SEQ ID NO: 3279 - protein, 6 aa, Artificial Sequence
  Representative cyclic modulating agent based on Desmoglein cell adhesion recognition sequence
KLNKDE

SEQ ID NO: 3280 - protein, 7 aa, Artificial Sequence
  Representative cyclic modulating agent based on Desmoglein cell adhesion recognition sequence
KLNKDTE

SEQ ID NO: 3281 - protein, 8 aa, Artificial Sequence
  Representative cyclic modulating agent based on Desmoglein cell adhesion recognition sequence
KLNKDTGE

SEQ ID NO: 3282 - protein, 7 aa, Artificial Sequence
  Representative cyclic modulating agent based on Desmoglein cell adhesion recognition sequence
KYLNKDE

SEQ ID NO: 3283 - protein, 8 aa, Artificial Sequence
  Representative cyclic modulating agent based on Desmoglein cell adhesion recognition sequence
KYLNKDTE

SEQ ID NO: 3284 - protein, 9 aa, Artificial Sequence
  Representative cyclic modulating agent based on Desmoglein cell adhesion recognition sequence
KYLNKDTGE

SEQ ID NO: 3285 - protein, 8 aa, Artificial Sequence
  Representative cyclic modulating agent based on Desmoglein cell adhesion recognition sequence
KFYLNKDE

SEQ ID NO: 3286 - protein, 9 aa, Artificial Sequence
  Representative cyclic modulating agent based on Desmoglein cell adhesion recognition sequence
KFYLNKDTE

SEQ ID NO: 3287 - protein, 10 aa, Artificial Sequence
  Representative cyclic modulating agent based on Desmoglein cell adhesion recognition sequence
KFYLNKDTGE

SEQ ID NO: 3288 - protein, 9 aa, Artificial Sequence
  Representative cyclic modulating agent based on Desmoglein cell adhesion recognition sequence
KVFYLNKDE

SEQ ID NO: 3289 - protein, 10 aa, Artificial Sequence
  Representative cyclic modulating agent based on Desmoglein cell adhesion recognition sequence
KVFYLNKDTE

SEQ ID NO: 3290 - protein, 11 aa, Artificial Sequence
  Representative cyclic modulating agent based on Desmoglein cell adhesion recognition sequence
KVFYLNKDTGE

SEQ ID NO: 3291 - protein, 5 aa, Artificial Sequence
  Representative cyclic modulating agent based on Desmoglein cell adhesion recognition sequence
NQKTG

SEQ ID NO: 3292 - protein, 5 aa, Artificial Sequence
  Representative cyclic modulating agent based on Desmoglein cell adhesion recognition sequence
INQKT

SEQ ID NO: 3293 - protein, 6 aa, Artificial Sequence
  Representative cyclic modulating agent based on Desmoglein cell adhesion recognition sequence
INQKTG

SEQ ID NO: 3294 - protein, 5 aa, Artificial Sequence
  Representative cyclic modulating agent based on Desmoglein cell adhesion recognition sequence
VINQK

SEQ ID NO: 3295 - protein, 6 aa, Artificial Sequence
  Representative cyclic modulating agent based on Desmoglein cell adhesion recognition sequence
VINQKT

SEQ ID NO: 3296 - protein, 7 aa, Artificial Sequence
  Representative cyclic modulating agent based on Desmoglein cell adhesion recognition sequence
VINQKTG

SEQ ID NO: 3297 - protein, 6 aa, Artificial Sequence
  Representative cyclic modulating agent based on Desmoglein cell adhesion recognition sequence
FVINQK

SEQ ID NO: 3298 - protein, 7 aa, Artificial Sequence
  Representative cyclic modulating agent based on Desmoglein cell adhesion recognition sequence
FVINQKT

SEQ ID NO: 3299 - protein, 8 aa, Artificial Sequence
  Representative cyclic modulating agent based on Desmoglein cell adhesion recognition sequence
FVINQKTG

SEQ ID NO: 3300 - protein, 7 aa, Artificial Sequence
  Representative cyclic modulating agent based on Desmoglein cell adhesion recognition sequence
IFVINQK

SEQ ID NO: 3301 - protein, 8 aa, Artificial Sequence
  Representative cyclic modulating agent based on Desmoglein cell adhesion recognition sequence
IFVINQKT

SEQ ID NO: 3302 - protein, 9 aa, Artificial Sequence
  Representative cyclic modulating agent based on Desmoglein cell adhesion recognition sequence
IFVINQKTG

SEQ ID NO: 3303 - protein, 5 aa, Artificial Sequence
  Representative cyclic modulating agent based on Desmoglein cell adhesion recognition sequence
NRNTG

SEQ ID NO: 3304 - protein, 5 aa, Artificial Sequence
  Representative cyclic modulating agent based on Desmoglein cell adhesion recognition sequence
INRNT

SEQ ID NO: 3305 - protein, 6 aa, Artificial Sequence
  Representative cyclic modulating agent based on Desmoglein cell adhesion recognition sequence
INRNTG

SEQ ID NO: 3306 - protein, 5 aa, Artificial Sequence
  Representative cyclic modulating agent based on Desmoglein cell adhesion recognition sequence
IINRN

SEQ ID NO: 3307 - protein, 6 aa, Artificial Sequence
  Representative cyclic modulating agent based on Desmoglein cell adhesion recognition sequence
IINRNT

SEQ ID NO: 3308 - protein, 7 aa, Artificial Sequence
  Representative cyclic modulating agent based on Desmoglein cell adhesion recognition sequence
IINRNTG

SEQ ID NO: 3309 - protein, 6 aa, Artificial Sequence
  Representative cyclic modulating agent based on Desmoglein cell adhesion recognition sequence
FIINRN

SEQ ID NO: 3310 - protein, 7 aa, Artificial Sequence
  Representative cyclic modulating agent based on Desmoglein cell adhesion recognition sequence
FIINRNT

SEQ ID NO: 3311 - protein, 8 aa, Artificial Sequence
  Representative cyclic modulating agent based on Desmoglein cell adhesion recognition sequence
FIINRNTG

SEQ ID NO: 3312 - protein, 7 aa, Artificial Sequence
  Representative cyclic modulating agent based on Desmoglein cell adhesion recognition sequence
MFIINRN

SEQ ID NO: 3313 - protein, 8 aa, Artificial Sequence
  Representative cyclic modulating agent based on Desmoglein cell adhesion recognition sequence
MFIINRNT

SEQ ID NO: 3314 - protein, 9 aa, Artificial Sequence
  Representative cyclic modulating agent based on Desmoglein cell adhesion recognition sequence
MFIINRNTG

SEQ ID NO: 3315 - protein, 5 aa, Artificial Sequence
  Representative cyclic modulating agent based on Desmoglein cell adhesion recognition sequence
NKDTG

SEQ ID NO: 3316 - protein, 5 aa, Artificial Sequence
  Representative cyclic modulating agent based on Desmoglein cell adhesion recognition sequence
LNKDT

SEQ ID NO: 3317 - protein, 6 aa, Artificial Sequence
  Representative cyclic modulating agent based on Desmoglein cell adhesion recognition sequence
LNKDTG

SEQ ID NO: 3318 - protein, 5 aa, Artificial Sequence
  Representative cyclic modulating agent based on Desmoglein cell adhesion recognition sequence
YLNKD

SEQ ID NO: 3319 - protein, 6 aa, Artificial Sequence
  Representative cyclic modulating agent based on Desmoglein cell adhesion recognition sequence
YLNKDT

SEQ ID NO: 3320 - protein, 7 aa, Artificial Sequence
  Representative cyclic modulating agent based on Desmoglein cell adhesion recognition sequence
YLNKDTG

SEQ ID NO: 3321 - protein, 6 aa, Artificial Sequence
  Representative cyclic modulating agent based on Desmoglein cell adhesion recognition sequence
FYLNKD

SEQ ID NO: 3322 - protein, 7 aa, Artificial Sequence
  Representative cyclic modulating agent based on Desmoglein cell adhesion recognition sequence
FYLNKDT

SEQ ID NO: 3323 - protein, 8 aa, Artificial Sequence
  Representative cyclic modulating agent based on Desmoglein cell adhesion recognition sequence
FYLNKDTG

SEQ ID NO: 3324 - protein, 7 aa, Artificial Sequence
  Representative cyclic modulating agent based on Desmoglein cell adhesion recognition sequence
VFYLNKD

SEQ ID NO: 3325 - protein, 8 aa, Artificial Sequence
  Representative cyclic modulating agent based on Desmoglein cell adhesion recognition sequence
VFYLNKDT

SEQ ID NO: 3326 - protein, 9 aa, Artificial Sequence
  Representative cyclic modulating agent based on Desmoglein cell adhesion recognition sequence
VFYLNKDTG

SEQ ID NO: 3327 - protein, 5 aa, Artificial Sequence
  Representative cyclic modulating agent based on Desmocollin cell adhesion recognition sequence
CEKDC

SEQ ID NO: 3328 - protein, 6 aa, Artificial Sequence
  Representative cyclic modulating agent based on Desmocollin cell adhesion recognition sequence
CEKDTC

SEQ ID NO: 3329 - protein, 7 aa, Artificial Sequence
  Representative cyclic modulating agent based on Desmocollin cell adhesion recognition sequence
CEKDTGC

SEQ ID NO: 3330 - protein, 6 aa, Artificial Sequence
  Representative cyclic modulating agent based on Desmocollin cell adhesion recognition sequence
CIEKDC

SEQ ID NO: 3331 - protein, 7 aa, Artificial Sequence
  Representative cyclic modulating agent based on Desmocollin cell adhesion recognition sequence
CIEKDTC

SEQ ID NO: 3332 - protein, 8 aa, Artificial Sequence
  Representative cyclic modulating agent based on Desmocollin cell adhesion recognition sequence
CIEKDTGC

SEQ ID NO: 3333 - protein, 7 aa, Artificial Sequence
  Representative cyclic modulating agent based on Desmocollin cell adhesion recognition sequence
CYIEKDC

SEQ ID NO: 3334 - protein, 8 aa, Artificial Sequence
  Representative cyclic modulating agent based on Desmocollin cell adhesion recognition sequence
CYIEKDTC

SEQ ID NO: 3335 - protein, 9 aa, Artificial Sequence
  Representative cyclic modulating agent based on Desmocollin cell adhesion recognition sequence
CYIEKDTGC

SEQ ID NO: 3336 - protein, 8 aa, Artificial Sequence
  Representative cyclic modulating agent based on Desmocollin cell adhesion recognition sequence
CFYIEKDC

SEQ ID NO: 3337 - protein, 9 aa, Artificial Sequence
  Representative cyclic modulating agent based on Desmocollin cell adhesion recognition sequence
CFYIEKDTC

SEQ ID NO: 3338 - protein, 10 aa, Artificial Sequence
  Representative cyclic modulating agent based on Desmocollin cell adhesion recognition sequence
CFYIEKDTGC

SEQ ID NO: 3339 - protein, 9 aa, Artificial Sequence
  Representative cyclic modulating agent based on Desmocollin cell adhesion recognition sequence
CLFYIEKDC

SEQ ID NO: 3340 - protein, 10 aa, Artificial Sequence
  Representative cyclic modulating agent based on Desmocollin cell adhesion recognition sequence
CLFYIEKDTC

SEQ ID NO: 3341 - protein, 11 aa, Artificial Sequence
  Representative cyclic modulating agent based on Desmocollin cell adhesion recognition sequence
CLFYIEKDTGC

SEQ ID NO: 3342 - protein, 5 aa, Artificial Sequence
  Representative cyclic modulating agent based on Desmocollin cell adhesion recognition sequence
CERDC

SEQ ID NO: 3343 - protein, 6 aa, Artificial Sequence
  Representative cyclic modulating agent based on Desmocollin cell adhesion recognition sequence
CERDTC

SEQ ID NO: 3344 - protein, 7 aa, Artificial Sequence
  Representative cyclic modulating agent based on Desmocollin cell adhesion recognition sequence
CERDTGC

SEQ ID NO: 3345 - protein, 6 aa, Artificial Sequence
  Representative cyclic modulating agent based on Desmocollin cell adhesion recognition sequence
CVERDC

SEQ ID NO: 3346 - protein, 7 aa, Artificial Sequence
  Representative cyclic modulating agent based on Desmocollin cell adhesion recognition sequence
CVERDTC

SEQ ID NO: 3347 - protein, 8 aa, Artificial Sequence
  Representative cyclic modulating agent based on Desmocollin cell adhesion recognition sequence
CVERDTGC

SEQ ID NO: 3348 - protein, 7 aa, Artificial Sequence
  Representative cyclic modulating agent based on Desmocollin cell adhesion recognition sequence
CYVERDC

SEQ ID NO: 3349 - protein, 8 aa, Artificial Sequence
  Representative cyclic modulating agent based on Desmocollin cell adhesion recognition sequence
CYVERDTC

SEQ ID NO: 3350 - protein, 9 aa, Artificial Sequence
  Representative cyclic modulating agent based on Desmocollin cell adhesion recognition sequence
CYVERDTGC

SEQ ID NO: 3351 - protein, 8 aa, Artificial Sequence
  Representative cyclic modulating agent based on Desmocollin cell adhesion recognition sequence
CFYVERDC

SEQ ID NO: 3352 - protein, 9 aa, Artificial Sequence
  Representative cyclic modulating agent based on Desmocollin cell adhesion recognition sequence
CFYVERDTC

SEQ ID NO: 3353 - protein, 10 aa, Artificial Sequence
  Representative cyclic modulating agent based on Desmocollin cell adhesion recognition sequence
CFYVERDTGC

SEQ ID NO: 3354 - protein, 9 aa, Artificial Sequence
  Representative cyclic modulating agent based on Desmocollin cell adhesion recognition sequence
CLFYVERDC

SEQ ID NO: 3355 - protein, 10 aa, Artificial Sequence
  Representative cyclic modulating agent based on Desmocollin cell adhesion recognition sequence
CLFYVERDTC

SEQ ID NO: 3356 - protein, 11 aa, Artificial Sequence
  Representative cyclic modulating agent based on Desmocollin cell adhesion recognition sequence
CLFYVERDTGC

SEQ ID NO: 3357 - protein, 6 aa, Artificial Sequence
  Representative cyclic modulating agent based on Desmocollin cell adhesion recognition sequence
CIERDC

SEQ ID NO: 3358 - protein, 7 aa, Artificial Sequence
  Representative cyclic modulating agent based on Desmocollin cell adhesion recognition sequence
CIERDTC

SEQ ID NO: 3359 - protein, 8 aa, Artificial Sequence
  Representative cyclic modulating agent based on Desmocollin cell adhesion recognition sequence
CIERDTGC

SEQ ID NO: 3360 - protein, 7 aa, Artificial Sequence
  Representative cyclic modulating agent based on Desmocollin cell adhesion recognition sequence
CYIERDC

SEQ ID NO: 3361 - protein, 8 aa, Artificial Sequence
  Representative cyclic modulating agent based on Desmocollin cell adhesion recognition sequence
CYIERDTC

SEQ ID NO: 3362 - protein, 9 aa, Artificial Sequence
  Representative cyclic modulating agent based on Desmocollin cell adhesion recognition sequence
CYIERDTGC

SEQ ID NO: 3363 - protein, 8 aa, Artificial Sequence
  Representative cyclic modulating agent based on Desmocollin cell adhesion recognition sequence
CFYIERDC

SEQ ID NO: 3364 - protein, 9 aa, Artificial Sequence
  Representative cyclic modulating agent based on Desmocollin cell adhesion recognition sequence
CFYIERDTC

SEQ ID NO: 3365 - protein, 10 aa, Artificial Sequence
  Representative cyclic modulating agent based on Desmocollin cell adhesion recognition sequence
CFYIERDTGC

SEQ ID NO: 3366 - protein, 9 aa, Artificial Sequence
  Representative cyclic modulating agent based on Desmocollin cell adhesion recognition sequence
CLFYIERDC

SEQ ID NO: 3367 - protein, 10 aa, Artificial Sequence
  Representative cyclic modulating agent based on Desmocollin cell adhesion recognition sequence
CLFYIERDTC

SEQ ID NO: 3368 - protein, 11 aa, Artificial Sequence
  Representative cyclic modulating agent based on Desmocollin cell adhesion recognition sequence
CLFYIERDTGC

SEQ ID NO: 3369 - protein, 5 aa, Artificial Sequence
  Representative cyclic modulating agent based on Desmocollin cell adhesion recognition sequence
EEKDK

SEQ ID NO: 3370 - protein, 6 aa, Artificial Sequence
  Representative cyclic modulating agent based on Desmocollin cell adhesion recognition sequence
EEKDTK

SEQ ID NO: 3371 - protein, 7 aa, Artificial Sequence
  Representative cyclic modulating agent based on Desmocollin cell adhesion recognition sequence
EEKDTGK

SEQ ID NO: 3372 - protein, 6 aa, Artificial Sequence
  Representative cyclic modulating agent based on Desmocollin cell adhesion recognition sequence
EIEKDK

SEQ ID NO: 3373 - protein, 7 aa, Artificial Sequence
  Representative cyclic modulating agent based on Desmocollin cell adhesion recognition sequence
EIEKDTK

SEQ ID NO: 3374 - protein, 8 aa, Artificial Sequence
  Representative cyclic modulating agent based on Desmocollin cell adhesion recognition sequence
EIEKDTGK

SEQ ID NO: 3375 - protein, 7 aa, Artificial Sequence
  Representative cyclic modulating agent based on Desmocollin cell adhesion recognition sequence
EYIEKDK

SEQ ID NO: 3376 - protein, 8 aa, Artificial Sequence
  Representative cyclic modulating agent based on Desmocollin cell adhesion recognition sequence
EYIEKDTK

SEQ ID NO: 3377 - protein, 9 aa, Artificial Sequence
  Representative cyclic modulating agent based on Desmocollin cell adhesion recognition sequence
EYIEKDTGK

SEQ ID NO: 3378 - protein, 8 aa, Artificial Sequence
  Representative cyclic modulating agent based on Desmocollin cell adhesion recognition sequence
EFYIEKDK

SEQ ID NO: 3379 - protein, 9 aa, Artificial Sequence
  Representative cyclic modulating agent based on Desmocollin cell adhesion recognition sequence
EFYIEKDTK

SEQ ID NO: 3380 - protein, 10 aa, Artificial Sequence
  Representative cyclic modulating agent based on Desmocollin cell adhesion recognition sequence
EFYIEKDTGK

SEQ ID NO: 3381 - protein, 9 aa, Artificial Sequence
  Representative cyclic modulating agent based on Desmocollin cell adhesion recognition sequence
ELFYIEKDK

SEQ ID NO: 3382 - protein, 10 aa, Artificial Sequence
  Representative cyclic modulating agent based on Desmocollin cell adhesion recognition sequence
ELFYIEKDTK

SEQ ID NO: 3383 - protein, 11 aa, Artificial Sequence
  Representative cyclic modulating agent based on Desmocollin cell adhesion recognition sequence
ELFYIEKDTGK

SEQ ID NO: 3384 - protein, 5 aa, Artificial Sequence
  Representative cyclic modulating agent based on Desmocollin cell adhesion recognition sequence
EERDK

SEQ ID NO: 3385 - protein, 6 aa, Artificial Sequence
  Representative cyclic modulating agent based on Desmocollin cell adhesion recognition sequence
EERDTK

SEQ ID NO: 3386 - protein, 7 aa, Artificial Sequence
  Representative cyclic modulating agent based on Desmocollin cell adhesion recognition sequence
EERDTGK

SEQ ID NO: 3387 - protein, 6 aa, Artificial Sequence
  Representative cyclic modulating agent based on Desmocollin cell adhesion recognition sequence
EVERDK

SEQ ID NO: 3388 - protein, 7 aa, Artificial Sequence
  Representative cyclic modulating agent based on Desmocollin cell adhesion recognition sequence
EVERDTK

SEQ ID NO: 3389 - protein, 8 aa, Artificial Sequence
  Representative cyclic modulating agent based on Desmocollin cell adhesion recognition sequence
EVERDTGK

SEQ ID NO: 3390 - protein, 7 aa, Artificial Sequence
  Representative cyclic modulating agent based on Desmocollin cell adhesion recognition sequence
EYVERDK

SEQ ID NO: 3391 - protein, 7 aa, Artificial Sequence
  Representative cyclic modulating agent based on Desmocollin cell adhesion recognition sequence
YVERDTK

SEQ ID NO: 3392 - protein, 9 aa, Artificial Sequence
  Representative cyclic modulating agent based on Desmocollin cell adhesion recognition sequence
EYVERDTGK

SEQ ID NO: 3393 - protein, 8 aa, Artificial Sequence
  Representative cyclic modulating agent based on Desmocollin cell adhesion recognition sequence
EFYVERDK

SEQ ID NO: 3394 - protein, 9 aa, Artificial Sequence
  Representative cyclic modulating agent based on Desmocollin cell adhesion recognition sequence
EFYVERDTK

SEQ ID NO: 3395 - protein, 10 aa, Artificial Sequence
  Representative cyclic modulating agent based on Desmocollin cell adhesion recognition sequence
EFYVERDTGK

SEQ ID NO: 3396 - protein, 9 aa, Artificial Sequence
  Representative cyclic modulating agent based on Desmocollin cell adhesion recognition sequence
ELFYVERDK

SEQ ID NO: 3397 - protein, 10 aa, Artificial Sequence
  Representative cyclic modulating agent based on Desmocollin cell adhesion recognition sequence
ELFYVERDTK

SEQ ID NO: 3398 - protein, 11 aa, Artificial Sequence
  Representative cyclic modulating agent based on Desmocollin cell adhesion recognition sequence
ELFYVERDTGK

SEQ ID NO: 3399 - protein, 6 aa, Artificial Sequence
  Representative cyclic modulating agent based on Desmocollin cell adhesion recognition sequence
EIERDK

SEQ ID NO: 3400 - protein, 7 aa, Artificial Sequence
  Representative cyclic modulating agent based on Desmocollin cell adhesion recognition sequence
EIERDTK

SEQ ID NO: 3401 - protein, 8 aa, Artificial Sequence
  Representative cyclic modulating agent based on Desmocollin cell adhesion recognition sequence
EIERDTGK

SEQ ID NO: 3402 - protein, 7 aa, Artificial Sequence
  Representative cyclic modulating agent based on Desmocollin cell adhesion recognition sequence
EYIERDK

SEQ ID NO: 3403 - protein, 8 aa, Artificial Sequence
  Representative cyclic modulating agent based on Desmocollin cell adhesion recognition sequence
EYIERDTK

SEQ ID NO: 3404 - protein, 9 aa, Artificial Sequence
  Representative cyclic modulating agent based on Desmocollin cell adhesion recognition sequence
EYIERDTGK

SEQ ID NO: 3405 - protein, 8 aa, Artificial Sequence
  Representative cyclic modulating agent based on Desmocollin cell adhesion recognition sequence
EFYIERDK

SEQ ID NO: 3406 - protein, 9 aa, Artificial Sequence
  Representative cyclic modulating agent based on Desmocollin cell adhesion recognition sequence
EFYIERDTK

SEQ ID NO: 3407 - protein, 10 aa, Artificial Sequence
  Representative cyclic modulating agent based on Desmocollin cell adhesion recognition sequence
EFYIERDTGK

SEQ ID NO: 3408 - protein, 9 aa, Artificial Sequence
  Representative cyclic modulating agent based on Desmocollin cell adhesion recognition sequence
ELFYIERDK

SEQ ID NO: 3409 - protein, 10 aa, Artificial Sequence
  Representative cyclic modulating agent based on Desmocollin cell adhesion recognition sequence
ELFYIERDTK

SEQ ID NO: 3410 - protein, 11 aa, Artificial Sequence
  Representative cyclic modulating agent based on Desmocollin cell adhesion recognition sequence
ELFYIERDTGK

SEQ ID NO: 3411 - protein, 5 aa, Artificial Sequence
  Representative cyclic modulating agent based on Desmocollin cell adhesion recognition sequence
KEKDD

SEQ ID NO: 3412 - protein, 6 aa, Artificial Sequence
  Representative cyclic modulating agent based on Desmocollin cell adhesion recognition sequence
KEKDTD

SEQ ID NO: 3413 - protein, 7 aa, Artificial Sequence
  Representative cyclic modulating agent based on Desmocollin cell adhesion recognition sequence
KEKDTGD

SEQ ID NO: 3414 - protein, 6 aa, Artificial Sequence
  Representative cyclic modulating agent based on Desmocollin cell adhesion recognition sequence
KIEKDD

SEQ ID NO: 3415 - protein, 7 aa, Artificial Sequence
  Representative cyclic modulating agent based on Desmocollin cell adhesion recognition sequence
KIEKDTD

SEQ ID NO: 3416 - protein, 8 aa, Artificial Sequence
  Representative cyclic modulating agent based on Desmocollin cell adhesion recognition sequence
KIEKDTGD

SEQ ID NO: 3417 - protein, 7 aa, Artificial Sequence
  Representative cyclic modulating agent based on Desmocollin cell adhesion recognition sequence
KYIEKDD

SEQ ID NO: 3418 - protein, 8 aa, Artificial Sequence
  Representative cyclic modulating agent based on Desmocollin cell adhesion recognition sequence
KYIEKDTD

SEQ ID NO: 3419 - protein, 9 aa, Artificial Sequence
  Representative cyclic modulating agent based on Desmocollin cell adhesion recognition sequence
KYIEKDTGD

SEQ ID NO: 3420 - protein, 8 aa, Artificial Sequence
  Representative cyclic modulating agent based on Desmocollin cell adhesion recognition sequence
KFYIEKDD

SEQ ID NO: 3421 - protein, 9 aa, Artificial Sequence
  Representative cyclic modulating agent based on Desmocollin cell adhesion recognition sequence
KFYIEKDTD

SEQ ID NO: 3422 - protein, 10 aa, Artificial Sequence
  Representative cyclic modulating agent based on Desmocollin cell adhesion recognition sequence
KFYIEKDTGD

SEQ ID NO: 3423 - protein, 9 aa, Artificial Sequence
  Representative cyclic modulating agent based on Desmocollin cell adhesion recognition sequence
KLFYIEKDD

SEQ ID NO: 3424 - protein, 10 aa, Artificial Sequence
  Representative cyclic modulating agent based on Desmocollin cell adhesion recognition sequence
KLFYIEKDTD

SEQ ID NO: 3425 - protein, 11 aa, Artificial Sequence
  Representative cyclic modulating agent based on Desmocollin cell adhesion recognition sequence
KLFYIEKDTGD

SEQ ID NO: 3426 - protein, 5 aa, Artificial Sequence
  Representative cyclic modulating agent based on Desmocollin cell adhesion recognition sequence
KERDD

SEQ ID NO: 3427 - protein, 6 aa, Artificial Sequence
  Representative cyclic modulating agent based on Desmocollin cell adhesion recognition sequence
KERDTD

SEQ ID NO: 3428 - protein, 7 aa, Artificial Sequence
  Representative cyclic modulating agent based on Desmocollin cell adhesion recognition sequence
KERDTGD

SEQ ID NO: 3429 - protein, 6 aa, Artificial Sequence
  Representative cyclic modulating agent based on Desmocollin cell adhesion recognition sequence
KVERDD

SEQ ID NO: 3430 - protein, 7 aa, Artificial Sequence
  Representative cyclic modulating agent based on Desmocollin cell adhesion recognition sequence
KVERDTD

SEQ ID NO: 3431 - protein, 8 aa, Artificial Sequence
  Representative cyclic modulating agent based on Desmocollin cell adhesion recognition sequence
KVERDTGD

SEQ ID NO: 3432 - protein, 7 aa, Artificial Sequence
  Representative cyclic modulating agent based on Desmocollin cell adhesion recognition sequence
KYVERDD

SEQ ID NO: 3433 - protein, 8 aa, Artificial Sequence
  Representative cyclic modulating agent based on Desmocollin cell adhesion recognition sequence
KYVERDTD

SEQ ID NO: 3434 - protein, 9 aa, Artificial Sequence
  Representative cyclic modulating agent based on Desmocollin cell adhesion recognition sequence
KYVERDTGD

SEQ ID NO: 3435 - protein, 8 aa, Artificial Sequence
  Representative cyclic modulating agent based on Desmocollin cell adhesion recognition sequence
KFYVERDD

SEQ ID NO: 3436 - protein, 9 aa, Artificial Sequence
  Representative cyclic modulating agent based on Desmocollin cell adhesion recognition sequence
KFYVERDTD

SEQ ID NO: 3437 - protein, 10 aa, Artificial Sequence
  Representative cyclic modulating agent based on Desmocollin cell adhesion recognition sequence
KFYVERDTGD

SEQ ID NO: 3438 - protein, 9 aa, Artificial Sequence
  Representative cyclic modulating agent based on Desmocollin cell adhesion recognition sequence
KLFYVERDD

SEQ ID NO: 3439 - protein, 10 aa, Artificial Sequence
  Representative cyclic modulating agent based on Desmocollin cell adhesion recognition sequence
KLFYVERDTD

SEQ ID NO: 3440 - protein, 11 aa, Artificial Sequence
  Representative cyclic modulating agent based on Desmocollin cell adhesion recognition sequence
KLFYVERDTGD

SEQ ID NO: 3441 - protein, 6 aa, Artificial Sequence
  Representative cyclic modulating agent based on Desmocollin cell adhesion recognition sequence
KIERDD

SEQ ID NO: 3442 - protein, 7 aa, Artificial Sequence
  Representative cyclic modulating agent based on Desmocollin cell adhesion recognition sequence
KIERDTD

SEQ ID NO: 3443 - protein, 8 aa, Artificial Sequence
  Representative cyclic modulating agent based on Desmocollin cell adhesion recognition sequence
KIERDTGD

SEQ ID NO: 3444 - protein, 6 aa, Artificial Sequence
  Representative cyclic modulating agent based on Desmocollin cell adhesion recognition sequence
KYIERD

SEQ ID NO: 3445 - protein, 8 aa, Artificial Sequence
  Representative cyclic modulating agent based on Desmocollin cell adhesion recognition sequence
KYIERDTD

SEQ ID NO: 3446 - protein, 9 aa, Artificial Sequence
  Representative cyclic modulating agent based on Desmocollin cell adhesion recognition sequence
KYIERDTGD

SEQ ID NO: 3447 - protein, 8 aa, Artificial Sequence
  Representative cyclic modulating agent based on Desmocollin cell adhesion recognition sequence
KFYIERDD

SEQ ID NO: 3448 - protein, 9 aa, Artificial Sequence
  Representative cyclic modulating agent based on Desmocollin cell adhesion recognition sequence
KFYIERDTD

SEQ ID NO: 3449 - protein, 10 aa, Artificial Sequence
  Representative cyclic modulating agent based on Desmocollin cell adhesion recognition sequence
KFYIERDTGD

SEQ ID NO: 3450 - protein, 9 aa, Artificial Sequence
  Representative cyclic modulating agent based on Desmocollin cell adhesion recognition sequence
KLFYIERDD

SEQ ID NO: 3451 - protein, 10 aa, Artificial Sequence
  Representative cyclic modulating agent based on Desmocollin cell adhesion recognition sequence
KLFYIERDTD

SEQ ID NO: 3452 - protein, 11 aa, Artificial Sequence
  Representative cyclic modulating agent based on Desmocollin cell adhesion recognition sequence
KLFYIERDTGD

SEQ ID NO: 3453 - protein, 5 aa, Artificial Sequence
  Representative cyclic modulating agent based on Desmocollin cell adhesion recognition sequence
DEKDK

SEQ ID NO: 3454 - protein, 6 aa, Artificial Sequence
  Representative cyclic modulating agent based on Desmocollin cell adhesion recognition sequence
DEKDTK

SEQ ID NO: 3455 - protein, 7 aa, Artificial Sequence
  Representative cyclic modulating agent based on Desmocollin cell adhesion recognition sequence
DEKDTGK

SEQ ID NO: 3456 - protein, 6 aa, Artificial Sequence
  Representative cyclic modulating agent based on Desmocollin cell adhesion recognition sequence
DIEKDK

SEQ ID NO: 3457 - protein, 7 aa, Artificial Sequence
  Representative cyclic modulating agent based on Desmocollin cell adhesion recognition sequence
DIEKDTK

SEQ ID NO: 3458 - protein, 8 aa, Artificial Sequence
  Representative cyclic modulating agent based on Desmocollin cell adhesion recognition sequence
DIEKDTGK

SEQ ID NO: 3459 - protein, 7 aa, Artificial Sequence
  Representative cyclic modulating agent based on Desmocollin cell adhesion recognition sequence
DYIEKDK

SEQ ID NO: 3460 - protein, 8 aa, Artificial Sequence
  Representative cyclic modulating agent based on Desmocollin cell adhesion recognition sequence
DYIEKDTK

SEQ ID NO: 3461 - protein, 9 aa, Artificial Sequence
  Representative cyclic modulating agent based on Desmocollin cell adhesion recognition sequence
DYIEKDTGK

SEQ ID NO: 3462 - protein, 8 aa, Artificial Sequence
  Representative cyclic modulating agent based on Desmocollin cell adhesion recognition sequence
DFYIEKDK

SEQ ID NO: 3463 - protein, 9 aa, Artificial Sequence
  Representative cyclic modulating agent based on Desmocollin cell adhesion recognition sequence
DFYIEKDTK

SEQ ID NO: 3464 - protein, 10 aa, Artificial Sequence
  Representative cyclic modulating agent based on Desmocollin cell adhesion recognition sequence
DFYIEKDTGK

SEQ ID NO: 3465 - protein, 9 aa, Artificial Sequence
  Representative cyclic modulating agent based on Desmocollin cell adhesion recognition sequence
DLFYIEKDK

SEQ ID NO: 3466 - protein, 10 aa, Artificial Sequence
  Representative cyclic modulating agent based on Desmocollin cell adhesion recognition sequence
DLFYIEKDTK

SEQ ID NO: 3467 - protein, 11 aa, Artificial Sequence
  Representative cyclic modulating agent based on Desmocollin cell adhesion recognition sequence
DLFYIEKDTGK

SEQ ID NO: 3468 - protein, 5 aa, Artificial Sequence
  Representative cyclic modulating agent based on Desmocollin cell adhesion recognition sequence
DERDK

SEQ ID NO: 3469 - protein, 6 aa, Artificial Sequence
  Representative cyclic modulating agent based on Desmocollin cell adhesion recognition sequence
DERDTK

SEQ ID NO: 3470 - protein, 7 aa, Artificial Sequence
  Representative cyclic modulating agent based on Desmocollin cell adhesion recognition sequence
DERDTGK

SEQ ID NO: 3471 - protein, 6 aa, Artificial Sequence
  Representative cyclic modulating agent based on Desmocollin cell adhesion recognition sequence
DVERDK

SEQ ID NO: 3472 - protein, 7 aa, Artificial Sequence
  Representative cyclic modulating agent based on Desmocollin cell adhesion recognition sequence
DVERDTK

SEQ ID NO: 3473 - protein, 8 aa, Artificial Sequence
  Representative cyclic modulating agent based on Desmocollin cell adhesion recognition sequence
DVERDTGK

SEQ ID NO: 3474 - protein, 7 aa, Artificial Sequence
  Representative cyclic modulating agent based on Desmocollin cell adhesion recognition sequence
DYVERDK

SEQ ID NO: 3475 - protein, 8 aa, Artificial Sequence
  Representative cyclic modulating agent based on Desmocollin cell adhesion recognition sequence
DYVERDTK

SEQ ID NO: 3476 - protein, 9 aa, Artificial Sequence
  Representative cyclic modulating agent based on Desmocollin cell adhesion recognition sequence
DYVERDTGK

SEQ ID NO: 3477 - protein, 8 aa, Artificial Sequence
  Representative cyclic modulating agent based on Desmocollin cell adhesion recognition sequence
DFYVERDK

SEQ ID NO: 3478 - protein, 9 aa, Artificial Sequence
  Representative cyclic modulating agent based on Desmocollin cell adhesion recognition sequence
DFYVERDTK

SEQ ID NO: 3479 - protein, 10 aa, Artificial Sequence
  Representative cyclic modulating agent based on Desmocollin cell adhesion recognition sequence
DFYVERDTGK

SEQ ID NO: 3480 - protein, 9 aa, Artificial Sequence
  Representative cyclic modulating agent based on Desmocollin cell adhesion recognition sequence
DLFYVERDK

SEQ ID NO: 3481 - protein, 10 aa, Artificial Sequence
  Representative cyclic modulating agent based on Desmocollin cell adhesion recognition sequence
DLFYVERDTK

SEQ ID NO: 3482 - protein, 11 aa, Artificial Sequence
  Representative cyclic modulating agent based on Desmocollin cell adhesion recognition sequence
DLFYVERDTGK

SEQ ID NO: 3483 - protein, 6 aa, Artificial Sequence
  Representative cyclic modulating agent based on Desmocollin cell adhesion recognition sequence
DIERDK

SEQ ID NO: 3484 - protein, 7 aa, Artificial Sequence
  Representative cyclic modulating agent based on Desmocollin cell adhesion recognition sequence
DIERDTK

SEQ ID NO: 3485 - protein, 8 aa, Artificial Sequence
  Representative cyclic modulating agent based on Desmocollin cell adhesion recognition sequence
DIERDTGK

SEQ ID NO: 3486 - protein, 7 aa, Artificial Sequence
  Representative cyclic modulating agent based on Desmocollin cell adhesion recognition sequence
DYIERDK

SEQ ID NO: 3487 - protein, 8 aa, Artificial Sequence
  Representative cyclic modulating agent based on Desmocollin cell adhesion recognition sequence
DYIERDTK

SEQ ID NO: 3488 - protein, 9 aa, Artificial Sequence
  Representative cyclic modulating agent based on Desmocollin cell adhesion recognition sequence
DYIERDTGK

SEQ ID NO: 3489 - protein, 8 aa, Artificial Sequence
  Representative cyclic modulating agent based on Desmocollin cell adhesion recognition sequence
DFYIERDK

SEQ ID NO: 3490 - protein, 9 aa, Artificial Sequence
  Representative cyclic modulating agent based on Desmocollin cell adhesion recognition sequence
DFYIERDTK

SEQ ID NO: 3491 - protein, 10 aa, Artificial Sequence
  Representative cyclic modulating agent based on Desmocollin cell adhesion recognition sequence
DFYIERDTGK

SEQ ID NO: 3492 - protein, 9 aa, Artificial Sequence
  Representative cyclic modulating agent based on Desmocollin cell adhesion recognition sequence
DLFYIERDK

SEQ ID NO: 3493 - protein, 10 aa, Artificial Sequence
  Representative cyclic modulating agent based on Desmocollin cell adhesion recognition sequence
DLFYIERDTK

SEQ ID NO: 3494 - protein, 11 aa, Artificial Sequence
  Representative cyclic modulating agent based on Desmocollin cell adhesion recognition sequence
DLFYIERDTGK

SEQ ID NO: 3495 - protein, 5 aa, Artificial Sequence
  Representative cyclic modulating agent based on Desmocollin cell adhesion recognition sequence
KEKDE

SEQ ID NO: 3496 - protein, 6 aa, Artificial Sequence
  Representative cyclic modulating agent based on Desmocollin cell adhesion recognition sequence
KEKDTE

SEQ ID NO: 3497 - protein, 7 aa, Artificial Sequence
  Representative cyclic modulating agent based on Desmocollin cell adhesion recognition sequence
KEKDTGE

SEQ ID NO: 3498 - protein, 6 aa, Artificial Sequence
  Representative cyclic modulating agent based on Desmocollin cell adhesion recognition sequence
KIEKDE

SEQ ID NO: 3499 - protein, 7 aa, Artificial Sequence
  Representative cyclic modulating agent based on Desmocollin cell adhesion recognition sequence
KIEKDTE

SEQ ID NO: 3500 - protein, 8 aa, Artificial Sequence
  Representative cyclic modulating agent based on Desmocollin cell adhesion recognition sequence
KIEKDTGE

SEQ ID NO: 3501 - protein, 7 aa, Artificial Sequence
  Representative cyclic modulating agent based on Desmocollin cell adhesion recognition sequence
KYIEKDE

SEQ ID NO: 3502 - protein, 8 aa, Artificial Sequence
  Representative cyclic modulating agent based on Desmocollin cell adhesion recognition sequence
KYIEKDTE

SEQ ID NO: 3503 - protein, 9 aa, Artificial Sequence
  Representative cyclic modulating agent based on Desmocollin cell adhesion recognition sequence
KYIEKDTGE

SEQ ID NO: 3504 - protein, 8 aa, Artificial Sequence
  Representative cyclic modulating agent based on Desmocollin cell adhesion recognition sequence
KFYIEKDE

SEQ ID NO: 3505 - protein, 9 aa, Artificial Sequence
  Representative cyclic modulating agent based on Desmocollin cell adhesion recognition sequence
KFYIEKDTE

SEQ ID NO: 3506 - protein, 10 aa, Artificial Sequence
  Representative cyclic modulating agent based on Desmocollin cell adhesion recognition sequence
KFYIEKDTGE

SEQ ID NO: 3507 - protein, 9 aa, Artificial Sequence
  Representative cyclic modulating agent based on Desmocollin cell adhesion recognition sequence
KLFYIEKDE

SEQ ID NO: 3508 - protein, 10 aa, Artificial Sequence
  Representative cyclic modulating agent based on Desmocollin cell adhesion recognition sequence
KLFYIEKDTE

SEQ ID NO: 3509 - protein, 11 aa, Artificial Sequence
  Representative cyclic modulating agent based on Desmocollin cell adhesion recognition sequence
KLFYIEKDTGE

SEQ ID NO: 3510 - protein, 5 aa, Artificial Sequence
  Representative cyclic modulating agent based on Desmocollin cell adhesion recognition sequence
KERDE

SEQ ID NO: 3511 - protein, 6 aa, Artificial Sequence
  Representative cyclic modulating agent based on Desmocollin cell adhesion recognition sequence
KERDTE

SEQ ID NO: 3512 - protein, 7 aa, Artificial Sequence
  Representative cyclic modulating agent based on Desmocollin cell adhesion recognition sequence
KERDTGE

SEQ ID NO: 3513 - protein, 6 aa, Artificial Sequence
  Representative cyclic modulating agent based on Desmocollin cell adhesion recognition sequence
KVERDE

SEQ ID NO: 3514 - protein, 7 aa, Artificial Sequence
  Representative cyclic modulating agent based on Desmocollin cell adhesion recognition sequence
KVERDTE

SEQ ID NO: 3515 - protein, 8 aa, Artificial Sequence
  Representative cyclic modulating agent based on Desmocollin cell adhesion recognition sequence
KVERDTGE

SEQ ID NO: 3516 - protein, 7 aa, Artificial Sequence
  Representative cyclic modulating agent based on Desmocollin cell adhesion recognition sequence
KYVERDE

SEQ ID NO: 3517 - protein, 8 aa, Artificial Sequence
  Representative cyclic modulating agent based on Desmocollin cell adhesion recognition sequence
KYVERDTE

SEQ ID NO: 3518 - protein, 9 aa, Artificial Sequence
  Representative cyclic modulating agent based on Desmocollin cell adhesion recognition sequence
KYVERDTGE

SEQ ID NO: 3519 - protein, 8 aa, Artificial Sequence
  Representative cyclic modulating agent based on Desmocollin cell adhesion recognition sequence
KFYVERDE

SEQ ID NO: 3520 - protein, 9 aa, Artificial Sequence
  Representative cyclic modulating agent based on Desmocollin cell adhesion recognition sequence
KFYVERDTE

SEQ ID NO: 3521 - protein, 10 aa, Artificial Sequence
  Representative cyclic modulating agent based on Desmocollin cell adhesion recognition sequence
KFYVERDTGE

SEQ ID NO: 3522 - protein, 9 aa, Artificial Sequence
  Representative cyclic modulating agent based on Desmocollin cell adhesion recognition sequence
KLFYVERDE

SEQ ID NO: 3523 - protein, 10 aa, Artificial Sequence
  Representative cyclic modulating agent based on Desmocollin cell adhesion recognition sequence
KLFYVERDTE

SEQ ID NO: 3524 - protein, 11 aa, Artificial Sequence
  Representative cyclic modulating agent based on Desmocollin cell adhesion recognition sequence
KLFYVERDTGE

SEQ ID NO: 3525 - protein, 6 aa, Artificial Sequence
  Representative cyclic modulating agent based on Desmocollin cell adhesion recognition sequence
KIERDE

SEQ ID NO: 3526 - protein, 7 aa, Artificial Sequence
  Representative cyclic modulating agent based on Desmocollin cell adhesion recognition sequence
KIERDTE

SEQ ID NO: 3527 - protein, 8 aa, Artificial Sequence
  Representative cyclic modulating agent based on Desmocollin cell adhesion recognition sequence
KIERDTGE

SEQ ID NO: 3528 - protein, 7 aa, Artificial Sequence
  Representative cyclic modulating agent based on Desmocollin cell adhesion recognition sequence
KYIERDE

SEQ ID NO: 3529 - protein, 8 aa, Artificial Sequence
  Representative cyclic modulating agent based on Desmocollin cell adhesion recognition sequence
KYIERDTE

SEQ ID NO: 3530 - protein, 9 aa, Artificial Sequence
  Representative cyclic modulating agent based on Desmocollin cell adhesion recognition sequence
KYIERDTGE

SEQ ID NO: 3531 - protein, 8 aa, Artificial Sequence
  Representative cyclic modulating agent based on Desmocollin cell adhesion recognition sequence
KFYIERDE

SEQ ID NO: 3532 - protein, 9 aa, Artificial Sequence
  Representative cyclic modulating agent based on Desmocollin cell adhesion recognition sequence
KFYIERDTE

SEQ ID NO: 3533 - protein, 10 aa, Artificial Sequence
  Representative cyclic modulating agent based on Desmocollin cell adhesion recognition sequence
KFYIERDTGE

SEQ ID NO: 3534 - protein, 9 aa, Artificial Sequence
  Representative cyclic modulating agent based on Desmocollin cell adhesion recognition sequence
KLFYIERDE

SEQ ID NO: 3535 - protein, 10 aa, Artificial Sequence
  Representative cyclic modulating agent based on Desmocollin cell adhesion recognition sequence
KLFYIERDTE

SEQ ID NO: 3536 - protein, 11 aa, Artificial Sequence
  Representative cyclic modulating agent based on Desmocollin cell adhesion recognition sequence
KLFYIERDTGE

SEQ ID NO: 3537 - protein, 5 aa, Artificial Sequence
  Representative cyclic modulating agent based on Desmocollin cell adhesion recognition sequence
EKDTG

SEQ ID NO: 3538 - protein, 5 aa, Artificial Sequence
  Representative cyclic modulating agent based on Desmocollin cell adhesion recognition sequence
IEKDT

SEQ ID NO: 3539 - protein, 6 aa, Artificial Sequence
  Representative cyclic modulating agent based on Desmocollin cell adhesion recognition sequence
IEKDTG

SEQ ID NO: 3540 - protein, 5 aa, Artificial Sequence
  Representative cyclic modulating agent based on Desmocollin cell adhesion recognition sequence
YIEKD

SEQ ID NO: 3541 - protein, 6 aa, Artificial Sequence
  Representative cyclic modulating agent based on Desmocollin cell adhesion recognition sequence
YIEKDT

SEQ ID NO: 3542 - protein, 7 aa, Artificial Sequence
  Representative cyclic modulating agent based on Desmocollin cell adhesion recognition sequence
YIEKDTG

SEQ ID NO: 3543 - protein, 6 aa, Artificial Sequence
  Representative cyclic modulating agent based on Desmocollin cell adhesion recognition sequence
FYIEKD

SEQ ID NO: 3544 - protein, 7 aa, Artificial Sequence
  Representative cyclic modulating agent based on Desmocollin cell adhesion recognition sequence
FYIEKDT

SEQ ID NO: 3545 - protein, 8 aa, Artificial Sequence
  Representative cyclic modulating agent based on Desmocollin cell adhesion recognition sequence
FYIEKDTG

SEQ ID NO: 3546 - protein, 7 aa, Artificial Sequence
  Representative cyclic modulating agent based on Desmocollin cell adhesion recognition sequence
LFYIEKD

SEQ ID NO: 3547 - protein, 8 aa, Artificial Sequence
  Representative cyclic modulating agent based on Desmocollin cell adhesion recognition sequence
LFYIEKDT

SEQ ID NO: 3548 - protein, 9 aa, Artificial Sequence
  Representative cyclic modulating agent based on Desmocollin cell adhesion recognition sequence
LFYIEKDTG

SEQ ID NO: 3549 - protein, 5 aa, Artificial Sequence
  Representative cyclic modulating agent based on Desmocollin cell adhesion recognition sequence
ERDTG

SEQ ID NO: 3550 - protein, 5 aa, Artificial Sequence
  Representative cyclic modulating agent based on Desmocollin cell adhesion recognition sequence
VERDT

SEQ ID NO: 3551 - protein, 6 aa, Artificial Sequence
  Representative cyclic modulating agent based on Desmocollin cell adhesion recognition sequence
VERDTG

SEQ ID NO: 3552 - protein, 5 aa, Artificial Sequence
  Representative cyclic modulating agent based on Desmocollin cell adhesion recognition sequence
YVERD

SEQ ID NO: 3553 - protein, 6 aa, Artificial Sequence
  Representative cyclic modulating agent based on Desmocollin cell adhesion recognition sequence
YVERDT

SEQ ID NO: 3554 - protein, 7 aa, Artificial Sequence
  Representative cyclic modulating agent based on Desmocollin cell adhesion recognition sequence
YVERDTG

SEQ ID NO: 3555 - protein, 6 aa, Artificial Sequence
  Representative cyclic modulating agent based on Desmocollin cell adhesion recognition sequence
FYVERD

SEQ ID NO: 3556 - protein, 7 aa, Artificial Sequence
  Representative cyclic modulating agent based on Desmocollin cell adhesion recognition sequence
FYVERDT

SEQ ID NO: 3557 - protein, 8 aa, Artificial Sequence
  Representative cyclic modulating agent based on Desmocollin cell adhesion recognition sequence
FYVERDTG

SEQ ID NO: 3558 - protein, 7 aa, Artificial Sequence
  Representative cyclic modulating agent based on Desmocollin cell adhesion recognition sequence
LFYVERD

SEQ ID NO: 3559 - protein, 8 aa, Artificial Sequence
  Representative cyclic modulating agent based on Desmocollin cell adhesion recognition sequence
LFYVERDT

SEQ ID NO: 3560 - protein, 9 aa, Artificial Sequence
  Representative cyclic modulating agent based on Desmocollin cell adhesion recognition sequence
LFYVERDTG

SEQ ID NO: 3561 - protein, 5 aa, Artificial Sequence
  Representative cyclic modulating agent based on Desmocollin cell adhesion recognition sequence
IERDT

SEQ ID NO: 3562 - protein, 6 aa, Artificial Sequence
  Representative cyclic modulating agent based on Desmocollin cell adhesion recognition sequence
IERDTG

SEQ ID NO: 3563 - protein, 5 aa, Artificial Sequence
  Representative cyclic modulating agent based on Desmocollin cell adhesion recognition sequence
YIERD

SEQ ID NO: 3564 - protein, 6 aa, Artificial Sequence
  Representative cyclic modulating agent based on Desmocollin cell adhesion recognition sequence
YIERDT

SEQ ID NO: 3565 - protein, 7 aa, Artificial Sequence
  Representative cyclic modulating agent based on Desmocollin cell adhesion recognition sequence
YIERDTG

SEQ ID NO: 3566 - protein, 6 aa, Artificial Sequence
  Representative cyclic modulating agent based on Desmocollin cell adhesion recognition sequence
FYIERD

SEQ ID NO: 3567 - protein, 7 aa, Artificial Sequence
  Representative cyclic modulating agent based on Desmocollin cell adhesion recognition sequence
FYIERDT

SEQ ID NO: 3568 - protein, 8 aa, Artificial Sequence
  Representative cyclic modulating agent based on Desmocollin cell adhesion recognition sequence
FYIERDTG

SEQ ID NO: 3569 - protein, 7 aa, Artificial Sequence
  Representative cyclic modulating agent based on Desmocollin cell adhesion recognition sequence
LFYIERD

SEQ ID NO: 3570 - protein, 8 aa, Artificial Sequence
  Representative cyclic modulating agent based on Desmocollin cell adhesion recognition sequence
LFYIERDT

SEQ ID NO: 3571 - protein, 9 aa, Artificial Sequence
  Representative cyclic modulating agent based on Desmocollin cell adhesion recognition sequence
LFYIERDTG

SEQ ID NO: 3572 - protein, 5 aa, Artificial Sequence
  Representative cyclic modulating agent based on cadherin-related neuronal receptor cell adhesion recognition sequence
CDPVC

SEQ ID NO: 3573 - protein, 6 aa, Artificial Sequence
  Representative cyclic modulating agent based on cadherin-related neuronal receptor cell adhesion recognition sequence
CDPVSC

SEQ ID NO: 3574 - protein, 7 aa, Artificial Sequence
  Representative cyclic modulating agent based on cadherin-related neuronal receptor cell adhesion recognition sequence
CDPVSGC

SEQ ID NO: 3575 - protein, 6 aa, Artificial Sequence
  Representative cyclic modulating agent based on cadherin-related neuronal receptor cell adhesion recognition sequence
CIDPVC

SEQ ID NO: 3576 - protein, 7 aa, Artificial Sequence
  Representative cyclic modulating agent based on cadherin-related neuronal receptor cell adhesion recognition sequence
CIDPVSC

SEQ ID NO: 3577 - protein, 8 aa, Artificial Sequence
  Representative cyclic modulating agent based on cadherin-related neuronal receptor cell adhesion recognition sequence
CIDPVSGC

SEQ ID NO: 3578 - protein, 7 aa, Artificial Sequence
  Representative cyclic modulating agent based on cadherin-related neuronal receptor cell adhesion recognition sequence
CHIDPVC

SEQ ID NO: 3579 - protein, 8 aa, Artificial Sequence
  Representative cyclic modulating agent based on cadherin-related neuronal receptor cell adhesion recognition sequence
CHIDPVSC

SEQ ID NO: 3580 - protein, 9 aa, Artificial Sequence
  Representative cyclic modulating agent based on cadherin-related neuronal receptor cell adhesion recognition sequence
CHIDPVSGC

SEQ ID NO: 3581 - protein, 8 aa, Artificial Sequence
  Representative cyclic modulating agent based on cadherin-related neuronal receptor cell adhesion recognition sequence
CFHIDPVC

SEQ ID NO: 3582 - protein, 9 aa, Artificial Sequence
  Representative cyclic modulating agent based on cadherin-related neuronal receptor cell adhesion recognition sequence
CFHIDPVSC

SEQ ID NO: 3583 - protein, 10 aa, Artificial Sequence
  Representative cyclic modulating agent based on cadherin-related neuronal receptor cell adhesion recognition sequence
CFHIDPVSGC

SEQ ID NO: 3584 - protein, 9 aa, Artificial Sequence
  Representative cyclic modulating agent based on cadherin-related neuronal receptor cell adhesion recognition sequence
CKFHIDPVC

SEQ ID NO: 3585 - protein, 10 aa, Artificial Sequence
  Representative cyclic modulating agent based on cadherin-related neuronal receptor cell adhesion recognition sequence
CKFHIDPVSC

SEQ ID NO: 3586 - protein, 11 aa, Artificial Sequence
  Representative cyclic modulating agent based on cadherin-related neuronal receptor cell adhesion recognition sequence
CKFHIDPVSGC

SEQ ID NO: 3587 - protein, 5 aa, Artificial Sequence
  Representative cyclic modulating agent based on cadherin-related neuronal receptor cell adhesion recognition sequence
CDADC

SEQ ID NO: 3588 - protein, 6 aa, Artificial Sequence
  Representative cyclic modulating agent based on cadherin-related neuronal receptor cell adhesion recognition sequence
CDADTC

SEQ ID NO: 3589 - protein, 7 aa, Artificial Sequence
  Representative cyclic modulating agent based on cadherin-related neuronal receptor cell adhesion recognition sequence
CDADTGC

SEQ ID NO: 3590 - protein, 7 aa, Artificial Sequence
  Representative cyclic modulating agent based on cadherin-related neuronal receptor cell adhesion recognition sequence
CIDADTC

SEQ ID NO: 3591 - protein, 6 aa, Artificial Sequence
  Representative cyclic modulating agent based on cadherin-related neuronal receptor cell adhesion recognition sequence
CIDADC

SEQ ID NO: 3592 - protein, 8 aa, Artificial Sequence
  Representative cyclic modulating agent based on cadherin-related neuronal receptor cell adhesion recognition sequence
CIDADTGC

SEQ ID NO: 3593 - protein, 7 aa, Artificial Sequence
  Representative cyclic modulating agent based on cadherin-related neuronal receptor cell adhesion recognition sequence
CSIDADC

SEQ ID NO: 3594 - protein, 8 aa, Artificial Sequence
  Representative cyclic modulating agent based on cadherin-related neuronal receptor cell adhesion recognition sequence
CSIDADTC

SEQ ID NO: 3595 - protein, 9 aa, Artificial Sequence
  Representative cyclic modulating agent based on cadherin-related neuronal receptor cell adhesion recognition sequence
CSIDADTGC

SEQ ID NO: 3596 - protein, 8 aa, Artificial Sequence
  Representative cyclic modulating agent based on cadherin-related neuronal receptor cell adhesion recognition sequence
CFSIDADC

SEQ ID NO: 3597 - protein, 9 aa, Artificial Sequence
  Representative cyclic modulating agent based on cadherin-related neuronal receptor cell adhesion recognition sequence
CFSIDADTC

SEQ ID NO: 3598 - protein, 10 aa, Artificial Sequence
  Representative cyclic modulating agent based on cadherin-related neuronal receptor cell adhesion recognition sequence
CFSIDADTGC

SEQ ID NO: 3599 - protein, 9 aa, Artificial Sequence
  Representative cyclic modulating agent based on cadherin-related neuronal receptor cell adhesion recognition sequence
CQFSIDADC

SEQ ID NO: 3600 - protein, 10 aa, Artificial Sequence
  Representative cyclic modulating agent based on cadherin-related neuronal receptor cell adhesion recognition sequence
CQFSIDADTC

SEQ ID NO: 3601 - protein, 11 aa, Artificial Sequence
  Representative cyclic modulating agent based on cadherin-related neuronal receptor cell adhesion recognition sequence
CQFSIDADTGC

SEQ ID NO: 3602 - protein, 5 aa, Artificial Sequence
  Representative cyclic modulating agent based on cadherin-related neuronal receptor cell adhesion recognition sequence
CDSVC

SEQ ID NO: 3603 - protein, 6 aa, Artificial Sequence
  Representative cyclic modulating agent based on cadherin-related neuronal receptor cell adhesion recognition sequence
CDSVSC

SEQ ID NO: 3604 - protein, 7 aa, Artificial Sequence
  Representative cyclic modulating agent based on cadherin-related neuronal receptor cell adhesion recognition sequence
CDSVSGC

SEQ ID NO: 3605 - protein, 6 aa, Artificial Sequence
  Representative cyclic modulating agent based on cadherin-related neuronal receptor cell adhesion recognition sequence
CIDSVC

SEQ ID NO: 3606 - protein, 7 aa, Artificial Sequence
  Representative cyclic modulating agent based on cadherin-related neuronal receptor cell adhesion recognition sequence
CIDSVSC

SEQ ID NO: 3607 - protein, 8 aa, Artificial Sequence
  Representative cyclic modulating agent based on cadherin-related neuronal receptor cell adhesion recognition sequence
CIDSVSGC

SEQ ID NO: 3608 - protein, 7 aa, Artificial Sequence
  Representative cyclic modulating agent based on cadherin-related neuronal receptor cell adhesion recognition sequence
CHIDSVC

SEQ ID NO: 3609 - protein, 8 aa, Artificial Sequence
  Representative cyclic modulating agent based on cadherin-related neuronal receptor cell adhesion recognition sequence
CHIDSVSC

SEQ ID NO: 3610 - protein, 9 aa, Artificial Sequence
  Representative cyclic modulating agent based on cadherin-related neuronal receptor cell adhesion recognition sequence
CHIDSVSGC

SEQ ID NO: 3611 - protein, 8 aa, Artificial Sequence
  Representative cyclic modulating agent based on cadherin-related neuronal receptor cell adhesion recognition sequence
CFHIDSVC

SEQ ID NO: 3612 - protein, 9 aa, Artificial Sequence
  Representative cyclic modulating agent based on cadherin-related neuronal receptor cell adhesion recognition sequence
CFHIDSVSC

SEQ ID NO: 3613 - protein, 10 aa, Artificial Sequence
  Representative cyclic modulating agent based on cadherin-related neuronal receptor cell adhesion recognition sequence
CFHIDSVSGC

SEQ ID NO: 3614 - protein, 9 aa, Artificial Sequence
  Representative cyclic modulating agent based on cadherin-related neuronal receptor cell adhesion recognition sequence
CTFHIDSVC

SEQ ID NO: 3615 - protein, 10 aa, Artificial Sequence
  Representative cyclic modulating agent based on cadherin-related neuronal receptor cell adhesion recognition sequence
CTFHIDSVSC

SEQ ID NO: 3616 - protein, 11 aa, Artificial Sequence
  Representative cyclic modulating agent based on cadherin-related neuronal receptor cell adhesion recognition sequence
CTFHIDSVSGC

SEQ ID NO: 3617 - protein, 5 aa, Artificial Sequence
  Representative cyclic modulating agent based on cadherin-related neuronal receptor cell adhesion recognition sequence
CDSNC

SEQ ID NO: 3618 - protein, 6 aa, Artificial Sequence
  Representative cyclic modulating agent based on cadherin-related neuronal receptor cell adhesion recognition sequence
CDSNSC

SEQ ID NO: 3619 - protein, 7 aa, Artificial Sequence
  Representative cyclic modulating agent based on cadherin-related neuronal receptor cell adhesion recognition sequence
CDSNSGC

SEQ ID NO: 3620 - protein, 6 aa, Artificial Sequence
  Representative cyclic modulating agent based on cadherin-related neuronal receptor cell adhesion recognition sequence
CIDSNC

SEQ ID NO: 3621 - protein, 7 aa, Artificial Sequence
  Representative cyclic modulating agent based on cadherin-related neuronal receptor cell adhesion recognition sequence
CIDSNSC

SEQ ID NO: 3622 - protein, 8 aa, Artificial Sequence
  Representative cyclic modulating agent based on cadherin-related neuronal receptor cell adhesion recognition sequence
CIDSNSGC

SEQ ID NO: 3623 - protein, 7 aa, Artificial Sequence
  Representative cyclic modulating agent based on cadherin-related neuronal receptor cell adhesion recognition sequence
CNIDSNC

SEQ ID NO: 3624 - protein, 8 aa, Artificial Sequence
  Representative cyclic modulating agent based on cadherin-related neuronal receptor cell adhesion recognition sequence
CNIDSNSC

SEQ ID NO: 3625 - protein, 9 aa, Artificial Sequence
  Representative cyclic modulating agent based on cadherin-related neuronal receptor cell adhesion recognition sequence
CNIDSNSGC

SEQ ID NO: 3626 - protein, 8 aa, Artificial Sequence
  Representative cyclic modulating agent based on cadherin-related neuronal receptor cell adhesion recognition sequence
CFNIDSNC

SEQ ID NO: 3627 - protein, 9 aa, Artificial Sequence
  Representative cyclic modulating agent based on cadherin-related neuronal receptor cell adhesion recognition sequence
CFNIDSNSC

SEQ ID NO: 3628 - protein, 10 aa, Artificial Sequence
  Representative cyclic modulating agent based on cadherin-related neuronal receptor cell adhesion recognition sequence
CFNIDSNSGC

SEQ ID NO: 3629 - protein, 9 aa, Artificial Sequence
  Representative cyclic modulating agent based on cadherin-related neuronal receptor cell adhesion recognition sequence
CAFNIDSNC

SEQ ID NO: 3630 - protein, 7 aa, Artificial Sequence
  Representative cyclic modulating agent based on cadherin-related neuronal receptor cell adhesion recognition sequence
EINENTK

SEQ ID NO: 3631 - protein, 10 aa, Artificial Sequence
  Representative cyclic modulating agent based on cadherin-related neuronal receptor cell adhesion recognition sequence
CAFNIDSNSC

SEQ ID NO: 3632 - protein, 11 aa, Artificial Sequence
  Representative cyclic modulating agent based on cadherin-related neuronal receptor cell adhesion recognition sequence
CAFNIDSNSGC

SEQ ID NO: 3633 - protein, 5 aa, Artificial Sequence
  Representative cyclic modulating agent based on cadherin-related neuronal receptor cell adhesion recognition sequence
CDSSC

SEQ ID NO: 3634 - protein, 6 aa, Artificial Sequence
  Representative cyclic modulating agent based on cadherin-related neuronal receptor cell adhesion recognition sequence
CDSSSC

SEQ ID NO: 3635 - protein, 7 aa, Artificial Sequence
  Representative cyclic modulating agent based on cadherin-related neuronal receptor cell adhesion recognition sequence
CDSSSGC

SEQ ID NO: 3636 - protein, 6 aa, Artificial Sequence
  Representative cyclic modulating agent based on cadherin-related neuronal receptor cell adhesion recognition sequence
CIDSSC

SEQ ID NO: 3637 - protein, 7 aa, Artificial Sequence
  Representative cyclic modulating agent based on cadherin-related neuronal receptor cell adhesion recognition sequence
CIDSSSC

SEQ ID NO: 3638 - protein, 8 aa, Artificial Sequence
  Representative cyclic modulating agent based on cadherin-related neuronal receptor cell adhesion recognition sequence
CIDSSSGC

SEQ ID NO: 3639 - protein, 7 aa, Artificial Sequence
  Representative cyclic modulating agent based on cadherin-related neuronal receptor cell adhesion recognition sequence
CTIDSSC

SEQ ID NO: 3640 - protein, 8 aa, Artificial Sequence
  Representative cyclic modulating agent based on cadherin-related neuronal receptor cell adhesion recognition sequence
CTIDSSSC

SEQ ID NO: 3641 - protein, 9 aa, Artificial Sequence
  Representative cyclic modulating agent based on cadherin-related neuronal receptor cell adhesion recognition sequence
CTIDSSSGC

SEQ ID NO: 3642 - protein, 8 aa, Artificial Sequence
  Representative cyclic modulating agent based on cadherin-related neuronal receptor cell adhesion recognition sequence
CFTIDSSC

SEQ ID NO: 3643 - protein, 9 aa, Artificial Sequence
  Representative cyclic modulating agent based on cadherin-related neuronal receptor cell adhesion recognition sequence
CFTIDSSSC

SEQ ID NO: 3644 - protein, 10 aa, Artificial Sequence
  Representative cyclic modulating agent based on cadherin-related neuronal receptor cell adhesion recognition sequence
CFTIDSSSGC

SEQ ID NO: 3645 - protein, 9 aa, Artificial Sequence
  Representative cyclic modulating agent based on cadherin-related neuronal receptor cell adhesion recognition sequence
CKFTIDSSC

SEQ ID NO: 3646 - protein, 10 aa, Artificial Sequence
  Representative cyclic modulating agent based on cadherin-related neuronal receptor cell adhesion recognition sequence
CKFTIDSSSC

SEQ ID NO: 3647 - protein, 11 aa, Artificial Sequence
  Representative cyclic modulating agent based on cadherin-related neuronal receptor cell adhesion recognition sequence
CKFTIDSSSGC

SEQ ID NO: 3648 - protein, 5 aa, Artificial Sequence
  Representative cyclic modulating agent based on cadherin-related neuronal receptor cell adhesion recognition sequence
CDEKC

SEQ ID NO: 3649 - protein, 6 aa, Artificial Sequence
  Representative cyclic modulating agent based on cadherin-related neuronal receptor cell adhesion recognition sequence
CDEKNC

SEQ ID NO: 3650 - protein, 7 aa, Artificial Sequence
  Representative cyclic modulating agent based on cadherin-related neuronal receptor cell adhesion recognition sequence
CDEKNGC

SEQ ID NO: 3651 - protein, 6 aa, Artificial Sequence
  Representative cyclic modulating agent based on cadherin-related neuronal receptor cell adhesion recognition sequence
CLDEKC

SEQ ID NO: 3652 - protein, 7 aa, Artificial Sequence
  Representative cyclic modulating agent based on cadherin-related neuronal receptor cell adhesion recognition sequence
CLDEKNC

SEQ ID NO: 3653 - protein, 8 aa, Artificial Sequence
  Representative cyclic modulating agent based on cadherin-related neuronal receptor cell adhesion recognition sequence
CLDEKNGC

SEQ ID NO: 3654 - protein, 7 aa, Artificial Sequence
  Representative cyclic modulating agent based on cadherin-related neuronal receptor cell adhesion recognition sequence
CTLDEKC

SEQ ID NO: 3655 - protein, 8 aa, Artificial Sequence
  Representative cyclic modulating agent based on cadherin-related neuronal receptor cell adhesion recognition sequence
CTLDEKNC

SEQ ID NO: 3656 - protein, 9 aa, Artificial Sequence
  Representative cyclic modulating agent based on cadherin-related neuronal receptor cell adhesion recognition sequence
CTLDEKNGC

SEQ ID NO: 3657 - protein, 8 aa, Artificial Sequence
  Representative cyclic modulating agent based on cadherin-related neuronal receptor cell adhesion recognition sequence
CFTLDEKC

SEQ ID NO: 3658 - protein, 9 aa, Artificial Sequence
  Representative cyclic modulating agent based on cadherin-related neuronal receptor cell adhesion recognition sequence
CFTLDEKNC

SEQ ID NO: 3659 - protein, 10 aa, Artificial Sequence
  Representative cyclic modulating agent based on cadherin-related neuronal receptor cell adhesion recognition sequence
CFTLDEKNGC

SEQ ID NO: 3660 - protein, 9 aa, Artificial Sequence
  Representative cyclic modulating agent based on cadherin-related neuronal receptor cell adhesion recognition sequence
CLFTLDEKC

SEQ ID NO: 3661 - protein, 10 aa, Artificial Sequence
  Representative cyclic modulating agent based on cadherin-related neuronal receptor cell adhesion recognition sequence
CLFTLDEKNC

SEQ ID NO: 3662 - protein, 11 aa, Artificial Sequence
  Representative cyclic modulating agent based on cadherin-related neuronal receptor cell adhesion recognition sequence
CLFTLDEKNGC

SEQ ID NO: 3663 - protein, 5 aa, Artificial Sequence
  Representative cyclic modulating agent based on cadherin-related neuronal receptor cell adhesion recognition sequence
CNEKC

SEQ ID NO: 3664 - protein, 6 aa, Artificial Sequence
  Representative cyclic modulating agent based on cadherin-related neuronal receptor cell adhesion recognition sequence
CNEKTC

SEQ ID NO: 3665 - protein, 7 aa, Artificial Sequence
  Representative cyclic modulating agent based on cadherin-related neuronal receptor cell adhesion recognition sequence
CNEKTGC

SEQ ID NO: 3666 - protein, 6 aa, Artificial Sequence
  Representative cyclic modulating agent based on cadherin-related neuronal receptor cell adhesion recognition sequence
CINEKC

SEQ ID NO: 3667 - protein, 7 aa, Artificial Sequence
  Representative cyclic modulating agent based on cadherin-related neuronal receptor cell adhesion recognition sequence
CINEKTC

SEQ ID NO: 3668 - protein, 8 aa, Artificial Sequence
  Representative cyclic modulating agent based on cadherin-related neuronal receptor cell adhesion recognition sequence
CINEKTGC

SEQ ID NO: 3669 - protein, 7 aa, Artificial Sequence
  Representative cyclic modulating agent based on cadherin-related neuronal receptor cell adhesion recognition sequence
CLINEKC

SEQ ID NO: 3670 - protein, 8 aa, Artificial Sequence
  Representative cyclic modulating agent based on cadherin-related neuronal receptor cell adhesion recognition sequence
CLINEKTC

SEQ ID NO: 3671 - protein, 9 aa, Artificial Sequence
  Representative cyclic modulating agent based on cadherin-related neuronal receptor cell adhesion recognition sequence
CLINEKTGC

SEQ ID NO: 3672 - protein, 8 aa, Artificial Sequence
  Representative cyclic modulating agent based on cadherin-related neuronal receptor cell adhesion recognition sequence
CFLINEKC

SEQ ID NO: 3673 - protein, 9 aa, Artificial Sequence
  Representative cyclic modulating agent based on cadherin-related neuronal receptor cell adhesion recognition sequence
CFLINEKTC

SEQ ID NO: 3674 - protein, 10 aa, Artificial Sequence
  Representative cyclic modulating agent based on cadherin-related neuronal receptor cell adhesion recognition sequence
CFLINEKTGC

SEQ ID NO: 3675 - protein, 9 aa, Artificial Sequence
  Representative cyclic modulating agent based on cadherin-related neuronal receptor cell adhesion recognition sequence
CKFLINEKC

SEQ ID NO: 3676 - protein, 10 aa, Artificial Sequence
  Representative cyclic modulating agent based on cadherin-related neuronal receptor cell adhesion recognition sequence
CKFLINEKTC

SEQ ID NO: 3677 - protein, 11 aa, Artificial Sequence
  Representative cyclic modulating agent based on cadherin-related neuronal receptor cell adhesion recognition sequence
CKFLINEKTGC

SEQ ID NO: 3678 - protein, 5 aa, Artificial Sequence
  Representative cyclic modulating agent based on cadherin-related neuronal receptor cell adhesion recognition sequence
EDPVK

SEQ ID NO: 3679 - protein, 6 aa, Artificial Sequence
  Representative cyclic modulating agent based on cadherin-related neuronal receptor cell adhesion recognition sequence
EDPVSK

SEQ ID NO: 3680 - protein, 7 aa, Artificial Sequence
  Representative cyclic modulating agent based on cadherin-related neuronal receptor cell adhesion recognition sequence
EDPVSGK

SEQ ID NO: 3681 - protein, 6 aa, Artificial Sequence
  Representative cyclic modulating agent based on cadherin-related neuronal receptor cell adhesion recognition sequence
EIDPVK

SEQ ID NO: 3682 - protein, 7 aa, Artificial Sequence
  Representative cyclic modulating agent based on cadherin-related neuronal receptor cell adhesion recognition sequence
EIDPVSK

SEQ ID NO: 3683 - protein, 8 aa, Artificial Sequence
  Representative cyclic modulating agent based on cadherin-related neuronal receptor cell adhesion recognition sequence
EIDPVSGK

SEQ ID NO: 3684 - protein, 7 aa, Artificial Sequence
  Representative cyclic modulating agent based on cadherin-related neuronal receptor cell adhesion recognition sequence
EHIDPVK

SEQ ID NO: 3685 - protein, 8 aa, Artificial Sequence
  Representative cyclic modulating agent based on cadherin-related neuronal receptor cell adhesion recognition sequence
EHIDPVSK

SEQ ID NO: 3686 - protein, 9 aa, Artificial Sequence
  Representative cyclic modulating agent based on cadherin-related neuronal receptor cell adhesion recognition sequence
EHIDPVSGK

SEQ ID NO: 3687 - protein, 8 aa, Artificial Sequence
  Representative cyclic modulating agent based on cadherin-related neuronal receptor cell adhesion recognition sequence
EFHIDPVK

SEQ ID NO: 3688 - protein, 9 aa, Artificial Sequence
  Representative cyclic modulating agent based on cadherin-related neuronal receptor cell adhesion recognition sequence
EFHIDPVSK

SEQ ID NO: 3689 - protein, 10 aa, Artificial Sequence
  Representative cyclic modulating agent based on cadherin-related neuronal receptor cell adhesion recognition sequence
EFHIDPVSGK

SEQ ID NO: 3690 - protein, 9 aa, Artificial Sequence
  Representative cyclic modulating agent based on cadherin-related neuronal receptor cell adhesion recognition sequence
EKFHIDPVK

SEQ ID NO: 3691 - protein, 10 aa, Artificial Sequence
  Representative cyclic modulating agent based on cadherin-related neuronal receptor cell adhesion recognition sequence
EKFHIDPVSK

SEQ ID NO: 3692 - protein, 11 aa, Artificial Sequence
  Representative cyclic modulating agent based on cadherin-related neuronal receptor cell adhesion recognition sequence
EKFHIDPVSGK

SEQ ID NO: 3693 - protein, 5 aa, Artificial Sequence
  Representative cyclic modulating agent based on cadherin-related neuronal receptor cell adhesion recognition sequence
EDADK

SEQ ID NO: 3694 - protein, 6 aa, Artificial Sequence
  Representative cyclic modulating agent based on cadherin-related neuronal receptor cell adhesion recognition sequence
EDADTK

SEQ ID NO: 3695 - protein, 7 aa, Artificial Sequence
  Representative cyclic modulating agent based on cadherin-related neuronal receptor cell adhesion recognition sequence
EDADTGK

SEQ ID NO: 3696 - protein, 6 aa, Artificial Sequence
  Representative cyclic modulating agent based on cadherin-related neuronal receptor cell adhesion recognition sequence
EIDADK

SEQ ID NO: 3697 - protein, 7 aa, Artificial Sequence
  Representative cyclic modulating agent based on cadherin-related neuronal receptor cell adhesion recognition sequence
EIDADTK

SEQ ID NO: 3698 - protein, 8 aa, Artificial Sequence
  Representative cyclic modulating agent based on cadherin-related neuronal receptor cell adhesion recognition sequence
EIDADTGK

SEQ ID NO: 3699 - protein, 7 aa, Artificial Sequence
  Representative cyclic modulating agent based on cadherin-related neuronal receptor cell adhesion recognition sequence
ESIDADK

SEQ ID NO: 3700 - protein, 8 aa, Artificial Sequence
  Representative cyclic modulating agent based on cadherin-related neuronal receptor cell adhesion recognition sequence
ESIDADTK

SEQ ID NO: 3701 - protein, 9 aa, Artificial Sequence
  Representative cyclic modulating agent based on cadherin-related neuronal receptor cell adhesion recognition sequence
ESIDADTGK

SEQ ID NO: 3702 - protein, 8 aa, Artificial Sequence
  Representative cyclic modulating agent based on cadherin-related neuronal receptor cell adhesion recognition sequence
EFSIDADK

SEQ ID NO: 3703 - protein, 9 aa, Artificial Sequence
  Representative cyclic modulating agent based on cadherin-related neuronal receptor cell adhesion recognition sequence
EFSIDADTK

SEQ ID NO: 3704 - protein, 10 aa, Artificial Sequence
  Representative cyclic modulating agent based on cadherin-related neuronal receptor cell adhesion recognition sequence
EFSIDADTGK

SEQ ID NO: 3705 - protein, 9 aa, Artificial Sequence
  Representative cyclic modulating agent based on cadherin-related neuronal receptor cell adhesion recognition sequence
EQFSIDADK

SEQ ID NO: 3706 - protein, 10 aa, Artificial Sequence
  Representative cyclic modulating agent based on cadherin-related neuronal receptor cell adhesion recognition sequence
EQFSIDADTK

SEQ ID NO: 3707 - protein, 11 aa, Artificial Sequence
  Representative cyclic modulating agent based on cadherin-related neuronal receptor cell adhesion recognition sequence
EQFSIDADTGK

SEQ ID NO: 3708 - protein, 5 aa, Artificial Sequence
  Representative cyclic modulating agent based on cadherin-related neuronal receptor cell adhesion recognition sequence
EDSVK

SEQ ID NO: 3709 - protein, 6 aa, Artificial Sequence
  Representative cyclic modulating agent based on cadherin-related neuronal receptor cell adhesion recognition sequence
EDSVSK

SEQ ID NO: 3710 - protein, 7 aa, Artificial Sequence
  Representative cyclic modulating agent based on cadherin-related neuronal receptor cell adhesion recognition sequence
EDSVSGK

SEQ ID NO: 3711 - protein, 6 aa, Artificial Sequence
  Representative cyclic modulating agent based on cadherin-related neuronal receptor cell adhesion recognition sequence
EIDSVK

SEQ ID NO: 3712 - protein, 7 aa, Artificial Sequence
  Representative cyclic modulating agent based on cadherin-related neuronal receptor cell adhesion recognition sequence
EIDSVSK

SEQ ID NO: 3713 - protein, 8 aa, Artificial Sequence
  Representative cyclic modulating agent based on cadherin-related neuronal receptor cell adhesion recognition sequence
EIDSVSGK

SEQ ID NO: 3714 - protein, 7 aa, Artificial Sequence
  Representative cyclic modulating agent based on cadherin-related neuronal receptor cell adhesion recognition sequence
EHIDSVK

SEQ ID NO: 3715 - protein, 8 aa, Artificial Sequence
  Representative cyclic modulating agent based on cadherin-related neuronal receptor cell adhesion recognition sequence
EHIDSVSK

SEQ ID NO: 3716 - protein, 9 aa, Artificial Sequence
  Representative cyclic modulating agent based on cadherin-related neuronal receptor cell adhesion recognition sequence
EHIDSVSGK

SEQ ID NO: 3717 - protein, 8 aa, Artificial Sequence
  Representative cyclic modulating agent based on cadherin-related neuronal receptor cell adhesion recognition sequence
EFHIDSVK

SEQ ID NO: 3718 - protein, 9 aa, Artificial Sequence
  Representative cyclic modulating agent based on cadherin-related neuronal receptor cell adhesion recognition sequence
EFHIDSVSK

SEQ ID NO: 3719 - protein, 10 aa, Artificial Sequence
  Representative cyclic modulating agent based on cadherin-related neuronal receptor cell adhesion recognition sequence
EFHIDSVSGK

SEQ ID NO: 3720 - protein, 9 aa, Artificial Sequence
  Representative cyclic modulating agent based on cadherin-related neuronal receptor cell adhesion recognition sequence
ETFHIDSVK

SEQ ID NO: 3721 - protein, 10 aa, Artificial Sequence
  Representative cyclic modulating agent based on cadherin-related neuronal receptor cell adhesion recognition sequence
ETFHIDSVSK

SEQ ID NO: 3722 - protein, 11 aa, Artificial Sequence
  Representative cyclic modulating agent based on cadherin-related neuronal receptor cell adhesion recognition sequence
ETFHIDSVSGK

SEQ ID NO: 3723 - protein, 5 aa, Artificial Sequence
  Representative cyclic modulating agent based on cadherin-related neuronal receptor cell adhesion recognition sequence
EDSNK

SEQ ID NO: 3724 - protein, 6 aa, Artificial Sequence
  Representative cyclic modulating agent based on cadherin-related neuronal receptor cell adhesion recognition sequence
EDSNSK

SEQ ID NO: 3725 - protein, 7 aa, Artificial Sequence
  Representative cyclic modulating agent based on cadherin-related neuronal receptor cell adhesion recognition sequence
EDSNSGK

SEQ ID NO: 3726 - protein, 6 aa, Artificial Sequence
  Representative cyclic modulating agent based on cadherin-related neuronal receptor cell adhesion recognition sequence
EIDSNK

SEQ ID NO: 3727 - protein, 7 aa, Artificial Sequence
  Representative cyclic modulating agent based on cadherin-related neuronal receptor cell adhesion recognition sequence
EIDSNSK

SEQ ID NO: 3728 - protein, 8 aa, Artificial Sequence
  Representative cyclic modulating agent based on cadherin-related neuronal receptor cell adhesion recognition sequence
EIDSNSGK

SEQ ID NO: 3729 - protein, 7 aa, Artificial Sequence
  Representative cyclic modulating agent based on cadherin-related neuronal receptor cell adhesion recognition sequence
ENIDSNK

SEQ ID NO: 3730 - protein, 8 aa, Artificial Sequence
  Representative cyclic modulating agent based on cadherin-related neuronal receptor cell adhesion recognition sequence
ENIDSNSK

SEQ ID NO: 3731 - protein, 9 aa, Artificial Sequence
  Representative cyclic modulating agent based on cadherin-related neuronal receptor cell adhesion recognition sequence
ENIDSNSGK

SEQ ID NO: 3732 - protein, 8 aa, Artificial Sequence
  Representative cyclic modulating agent based on cadherin-related neuronal receptor cell adhesion recognition sequence
EFNIDSNK

SEQ ID NO: 3733 - protein, 9 aa, Artificial Sequence
  Representative cyclic modulating agent based on cadherin-related neuronal receptor cell adhesion recognition sequence
EFNIDSNSK

SEQ ID NO: 3734 - protein, 10 aa, Artificial Sequence
  Representative cyclic modulating agent based on cadherin-related neuronal receptor cell adhesion recognition sequence
EFNIDSNSGK

SEQ ID NO: 3735 - protein, 9 aa, Artificial Sequence
  Representative cyclic modulating agent based on cadherin-related neuronal receptor cell adhesion recognition sequence
EAFNIDSNK

SEQ ID NO: 3736 - protein, 8 aa, Artificial Sequence
  Representative cyclic modulating agent based on cadherin-related neuronal receptor cell adhesion recognition sequence
EIINENTK

SEQ ID NO: 3737 - protein, 10 aa, Artificial Sequence
  Representative cyclic modulating agent based on cadherin-related neuronal receptor cell adhesion recognition sequence
EAFNIDSNSK

SEQ ID NO: 3738 - protein, 11 aa, Artificial Sequence
  Representative cyclic modulating agent based on cadherin-related neuronal receptor cell adhesion recognition sequence
EAFNIDSNSGK

SEQ ID NO: 3739 - protein, 5 aa, Artificial Sequence
  Representative cyclic modulating agent based on cadherin-related neuronal receptor cell adhesion recognition sequence
EDSSK

SEQ ID NO: 3740 - protein, 6 aa, Artificial Sequence
  Representative cyclic modulating agent based on cadherin-related neuronal receptor cell adhesion recognition sequence
EDSSSK

SEQ ID NO: 3741 - protein, 7 aa, Artificial Sequence
  Representative cyclic modulating agent based on cadherin-related neuronal receptor cell adhesion recognition sequence
EDSSSGK

SEQ ID NO: 3742 - protein, 6 aa, Artificial Sequence
  Representative cyclic modulating agent based on cadherin-related neuronal receptor cell adhesion recognition sequence
EIDSSK

SEQ ID NO: 3743 - protein, 7 aa, Artificial Sequence
  Representative cyclic modulating agent based on cadherin-related neuronal receptor cell adhesion recognition sequence
EIDSSSK

SEQ ID NO: 3744 - protein, 8 aa, Artificial Sequence
  Representative cyclic modulating agent based on cadherin-related neuronal receptor cell adhesion recognition sequence
EIDSSSGK

SEQ ID NO: 3745 - protein, 7 aa, Artificial Sequence
  Representative cyclic modulating agent based on cadherin-related neuronal receptor cell adhesion recognition sequence
ETIDSSK

SEQ ID NO: 3746 - protein, 8 aa, Artificial Sequence
  Representative cyclic modulating agent based on cadherin-related neuronal receptor cell adhesion recognition sequence
ETIDSSSK

SEQ ID NO: 3747 - protein, 9 aa, Artificial Sequence
  Representative cyclic modulating agent based on cadherin-related neuronal receptor cell adhesion recognition sequence
ETIDSSSGK

SEQ ID NO: 3748 - protein, 8 aa, Artificial Sequence
  Representative cyclic modulating agent based on cadherin-related neuronal receptor cell adhesion recognition sequence
EFTIDSSK

SEQ ID NO: 3749 - protein, 9 aa, Artificial Sequence
  Representative cyclic modulating agent based on cadherin-related neuronal receptor cell adhesion recognition sequence
EFTIDSSSK

SEQ ID NO: 3750 - protein, 10 aa, Artificial Sequence
  Representative cyclic modulating agent based on cadherin-related neuronal receptor cell adhesion recognition sequence
EFTIDSSSGK

SEQ ID NO: 3751 - protein, 9 aa, Artificial Sequence
  Representative cyclic modulating agent based on cadherin-related neuronal receptor cell adhesion recognition sequence
EKFTIDSSK

SEQ ID NO: 3752 - protein, 10 aa, Artificial Sequence
  Representative cyclic modulating agent based on cadherin-related neuronal receptor cell adhesion recognition sequence
EKFTIDSSSK

SEQ ID NO: 3753 - protein, 11 aa, Artificial Sequence
  Representative cyclic modulating agent based on cadherin-related neuronal receptor cell adhesion recognition sequence
EKFTIDSSSGK

SEQ ID NO: 3754 - protein, 5 aa, Artificial Sequence
  Representative cyclic modulating agent based on cadherin-related neuronal receptor cell adhesion recognition sequence
EDEKK

SEQ ID NO: 3755 - protein, 6 aa, Artificial Sequence
  Representative cyclic modulating agent based on cadherin-related neuronal receptor cell adhesion recognition sequence
EDEKNK

SEQ ID NO: 3756 - protein, 7 aa, Artificial Sequence
  Representative cyclic modulating agent based on cadherin-related neuronal receptor cell adhesion recognition sequence
EDEKNGK

SEQ ID NO: 3757 - protein, 6 aa, Artificial Sequence
  Representative cyclic modulating agent based on cadherin-related neuronal receptor cell adhesion recognition sequence
ELDEKK

SEQ ID NO: 3758 - protein, 7 aa, Artificial Sequence
  Representative cyclic modulating agent based on cadherin-related neuronal receptor cell adhesion recognition sequence
ELDEKNK

SEQ ID NO: 3759 - protein, 8 aa, Artificial Sequence
  Representative cyclic modulating agent based on cadherin-related neuronal receptor cell adhesion recognition sequence
ELDEKNGK

SEQ ID NO: 3760 - protein, 7 aa, Artificial Sequence
  Representative cyclic modulating agent based on cadherin-related neuronal receptor cell adhesion recognition sequence
ETLDEKK

SEQ ID NO: 3761 - protein, 8 aa, Artificial Sequence
  Representative cyclic modulating agent based on cadherin-related neuronal receptor cell adhesion recognition sequence
ETLDEKNK

SEQ ID NO: 3762 - protein, 9 aa, Artificial Sequence
  Representative cyclic modulating agent based on cadherin-related neuronal receptor cell adhesion recognition sequence
ETLDEKNGK

SEQ ID NO: 3763 - protein, 8 aa, Artificial Sequence
  Representative cyclic modulating agent based on cadherin-related neuronal receptor cell adhesion recognition sequence
EFTLDEKK

SEQ ID NO: 3764 - protein, 9 aa, Artificial Sequence
  Representative cyclic modulating agent based on cadherin-related neuronal receptor cell adhesion recognition sequence
EFTLDEKNK

SEQ ID NO: 3765 - protein, 10 aa, Artificial Sequence
  Representative cyclic modulating agent based on cadherin-related neuronal receptor cell adhesion recognition sequence
EFTLDEKNGK

SEQ ID NO: 3766 - protein, 9 aa, Artificial Sequence
  Representative cyclic modulating agent based on cadherin-related neuronal receptor cell adhesion recognition sequence
ELFTLDEKK

SEQ ID NO: 3767 - protein, 10 aa, Artificial Sequence
  Representative cyclic modulating agent based on cadherin-related neuronal receptor cell adhesion recognition sequence
ELFTLDEKNK

SEQ ID NO: 3768 - protein, 11 aa, Artificial Sequence
  Representative cyclic modulating agent based on cadherin-related neuronal receptor cell adhesion recognition sequence
ELFTLDEKNGK

SEQ ID NO: 3769 - protein, 5 aa, Artificial Sequence
  Representative cyclic modulating agent based on cadherin-related neuronal receptor cell adhesion recognition sequence
ENEKK

SEQ ID NO: 3770 - protein, 6 aa, Artificial Sequence
  Representative cyclic modulating agent based on cadherin-related neuronal receptor cell adhesion recognition sequence
ENEKTK

SEQ ID NO: 3771 - protein, 7 aa, Artificial Sequence
  Representative cyclic modulating agent based on cadherin-related neuronal receptor cell adhesion recognition sequence
ENEKTGK

SEQ ID NO: 3772 - protein, 6 aa, Artificial Sequence
  Representative cyclic modulating agent based on cadherin-related neuronal receptor cell adhesion recognition sequence
EINEKK

SEQ ID NO: 3773 - protein, 7 aa, Artificial Sequence
  Representative cyclic modulating agent based on cadherin-related neuronal receptor cell adhesion recognition sequence
EINEKTK

SEQ ID NO: 3774 - protein, 8 aa, Artificial Sequence
  Representative cyclic modulating agent based on cadherin-related neuronal receptor cell adhesion recognition sequence
EINEKTGK

SEQ ID NO: 3775 - protein, 7 aa, Artificial Sequence
  Representative cyclic modulating agent based on cadherin-related neuronal receptor cell adhesion recognition sequence
ELINEKK

SEQ ID NO: 3776 - protein, 8 aa, Artificial Sequence
  Representative cyclic modulating agent based on cadherin-related neuronal receptor cell adhesion recognition sequence
ELINEKTK

SEQ ID NO: 3777 - protein, 9 aa, Artificial Sequence
  Representative cyclic modulating agent based on cadherin-related neuronal receptor cell adhesion recognition sequence
ELINEKTGK

SEQ ID NO: 3778 - protein, 8 aa, Artificial Sequence
  Representative cyclic modulating agent based on cadherin-related neuronal receptor cell adhesion recognition sequence
EFLINEKK

SEQ ID NO: 3779 - protein, 9 aa, Artificial Sequence
  Representative cyclic modulating agent based on cadherin-related neuronal receptor cell adhesion recognition sequence
EFLINEKTK

SEQ ID NO: 3780 - protein, 10 aa, Artificial Sequence
  Representative cyclic modulating agent based on cadherin-related neuronal receptor cell adhesion recognition sequence
EFLINEKTGK

SEQ ID NO: 3781 - protein, 9 aa, Artificial Sequence
  Representative cyclic modulating agent based on cadherin-related neuronal receptor cell adhesion recognition sequence
EKFLINEKK

SEQ ID NO: 3782 - protein, 10 aa, Artificial Sequence
  Representative cyclic modulating agent based on cadherin-related neuronal receptor cell adhesion recognition sequence
EKFLINEKTK

SEQ ID NO: 3783 - protein, 11 aa, Artificial Sequence
  Representative cyclic modulating agent based on cadherin-related neuronal receptor cell adhesion recognition sequence
EKFLINEKTGK

SEQ ID NO: 3784 - protein, 5 aa, Artificial Sequence
  Representative cyclic modulating agent based on cadherin-related neuronal receptor cell adhesion recognition sequence
KDPVD

SEQ ID NO: 3785 - protein, 6 aa, Artificial Sequence
  Representative cyclic modulating agent based on cadherin-related neuronal receptor cell adhesion recognition sequence
KDPVSD

SEQ ID NO: 3786 - protein, 7 aa, Artificial Sequence
  Representative cyclic modulating agent based on cadherin-related neuronal receptor cell adhesion recognition sequence
KDPVSGD

SEQ ID NO: 3787 - protein, 6 aa, Artificial Sequence
  Representative cyclic modulating agent based on cadherin-related neuronal receptor cell adhesion recognition sequence
KIDPVD

SEQ ID NO: 3788 - protein, 7 aa, Artificial Sequence
  Representative cyclic modulating agent based on cadherin-related neuronal receptor cell adhesion recognition sequence
KIDPVSD

SEQ ID NO: 3789 - protein, 8 aa, Artificial Sequence
  Representative cyclic modulating agent based on cadherin-related neuronal receptor cell adhesion recognition sequence
KIDPVSGD

SEQ ID NO: 3790 - protein, 7 aa, Artificial Sequence
  Representative cyclic modulating agent based on cadherin-related neuronal receptor cell adhesion recognition sequence
KHIDPVD

SEQ ID NO: 3791 - protein, 8 aa, Artificial Sequence
  Representative cyclic modulating agent based on cadherin-related neuronal receptor cell adhesion recognition sequence
KHIDPVSD

SEQ ID NO: 3792 - protein, 9 aa, Artificial Sequence
  Representative cyclic modulating agent based on cadherin-related neuronal receptor cell adhesion recognition sequence
KHIDPVSGD

SEQ ID NO: 3793 - protein, 8 aa, Artificial Sequence
  Representative cyclic modulating agent based on cadherin-related neuronal receptor cell adhesion recognition sequence
KFHIDPVD

SEQ ID NO: 3794 - protein, 9 aa, Artificial Sequence
  Representative cyclic modulating agent based on cadherin-related neuronal receptor cell adhesion recognition sequence
KFHIDPVSD

SEQ ID NO: 3795 - protein, 10 aa, Artificial Sequence
  Representative cyclic modulating agent based on cadherin-related neuronal receptor cell adhesion recognition sequence
KFHIDPVSGD

SEQ ID NO: 3796 - protein, 9 aa, Artificial Sequence
  Representative cyclic modulating agent based on cadherin-related neuronal receptor cell adhesion recognition sequence
KKFHIDPVD

SEQ ID NO: 3797 - protein, 10 aa, Artificial Sequence
  Representative cyclic modulating agent based on cadherin-related neuronal receptor cell adhesion recognition sequence
KKFHIDPVSD

SEQ ID NO: 3798 - protein, 11 aa, Artificial Sequence
  Representative cyclic modulating agent based on cadherin-related neuronal receptor cell adhesion recognition sequence
KKFHIDPVSGD

SEQ ID NO: 3799 - protein, 5 aa, Artificial Sequence
  Representative cyclic modulating agent based on cadherin-related neuronal receptor cell adhesion recognition sequence
KDADD

SEQ ID NO: 3800 - protein, 6 aa, Artificial Sequence
  Representative cyclic modulating agent based on cadherin-related neuronal receptor cell adhesion recognition sequence
KDADTD

SEQ ID NO: 3801 - protein, 7 aa, Artificial Sequence
  Representative cyclic modulating agent based on cadherin-related neuronal receptor cell adhesion recognition sequence
KDADTGD

SEQ ID NO: 3802 - protein, 6 aa, Artificial Sequence
  Representative cyclic modulating agent based on cadherin-related neuronal receptor cell adhesion recognition sequence
KIDADD

SEQ ID NO: 3803 - protein, 7 aa, Artificial Sequence
  Representative cyclic modulating agent based on cadherin-related neuronal receptor cell adhesion recognition sequence
KIDADTD

SEQ ID NO: 3804 - protein, 8 aa, Artificial Sequence
  Representative cyclic modulating agent based on cadherin-related neuronal receptor cell adhesion recognition sequence
KIDADTGD

SEQ ID NO: 3805 - protein, 7 aa, Artificial Sequence
  Representative cyclic modulating agent based on cadherin-related neuronal receptor cell adhesion recognition sequence
KSIDADD

SEQ ID NO: 3806 - protein, 8 aa, Artificial Sequence
  Representative cyclic modulating agent based on cadherin-related neuronal receptor cell adhesion recognition sequence
KSIDADTD

SEQ ID NO: 3807 - protein, 9 aa, Artificial Sequence
  Representative cyclic modulating agent based on cadherin-related neuronal receptor cell adhesion recognition sequence
KSIDADTGD

SEQ ID NO: 3808 - protein, 8 aa, Artificial Sequence
  Representative cyclic modulating agent based on cadherin-related neuronal receptor cell adhesion recognition sequence
KFSIDADD

SEQ ID NO: 3809 - protein, 9 aa, Artificial Sequence
  Representative cyclic modulating agent based on cadherin-related neuronal receptor cell adhesion recognition sequence
KFSIDADTD

SEQ ID NO: 3810 - protein, 10 aa, Artificial Sequence
  Representative cyclic modulating agent based on cadherin-related neuronal receptor cell adhesion recognition sequence
KFSIDADTGD

SEQ ID NO: 3811 - protein, 9 aa, Artificial Sequence
  Representative cyclic modulating agent based on cadherin-related neuronal receptor cell adhesion recognition sequence
KQFSIDADD

SEQ ID NO: 3812 - protein, 10 aa, Artificial Sequence
  Representative cyclic modulating agent based on cadherin-related neuronal receptor cell adhesion recognition sequence
KQFSIDADTD

SEQ ID NO: 3813 - protein, 11 aa, Artificial Sequence
  Representative cyclic modulating agent based on cadherin-related neuronal receptor cell adhesion recognition sequence
KQFSIDADTGD

SEQ ID NO: 3814 - protein, 5 aa, Artificial Sequence
  Representative cyclic modulating agent based on cadherin-related neuronal receptor cell adhesion recognition sequence
KDSVD

SEQ ID NO: 3815 - protein, 6 aa, Artificial Sequence
  Representative cyclic modulating agent based on cadherin-related neuronal receptor cell adhesion recognition sequence
KDSVSD

SEQ ID NO: 3816 - protein, 7 aa, Artificial Sequence
  Representative cyclic modulating agent based on cadherin-related neuronal receptor cell adhesion recognition sequence
KDSVSGD

SEQ ID NO: 3817 - protein, 6 aa, Artificial Sequence
  Representative cyclic modulating agent based on cadherin-related neuronal receptor cell adhesion recognition sequence
KIDSVD

SEQ ID NO: 3818 - protein, 7 aa, Artificial Sequence
  Representative cyclic modulating agent based on cadherin-related neuronal receptor cell adhesion recognition sequence
KIDSVSD

SEQ ID NO: 3819 - protein, 8 aa, Artificial Sequence
  Representative cyclic modulating agent based on cadherin-related neuronal receptor cell adhesion recognition sequence
KIDSVSGD

SEQ ID NO: 3820 - protein, 7 aa, Artificial Sequence
  Representative cyclic modulating agent based on cadherin-related neuronal receptor cell adhesion recognition sequence
KHIDSVD

SEQ ID NO: 3821 - protein, 8 aa, Artificial Sequence
  Representative cyclic modulating agent based on cadherin-related neuronal receptor cell adhesion recognition sequence
KHIDSVSD

SEQ ID NO: 3822 - protein, 9 aa, Artificial Sequence
  Representative cyclic modulating agent based on cadherin-related neuronal receptor cell adhesion recognition sequence
KHIDSVSGD

SEQ ID NO: 3823 - protein, 8 aa, Artificial Sequence
  Representative cyclic modulating agent based on cadherin-related neuronal receptor cell adhesion recognition sequence
KFHIDSVD

SEQ ID NO: 3824 - protein, 9 aa, Artificial Sequence
  Representative cyclic modulating agent based on cadherin-related neuronal receptor cell adhesion recognition sequence
KFHIDSVSD

SEQ ID NO: 3825 - protein, 10 aa, Artificial Sequence
  Representative cyclic modulating agent based on cadherin-related neuronal receptor cell adhesion recognition sequence
KFHIDSVSGD

SEQ ID NO: 3826 - protein, 9 aa, Artificial Sequence
  Representative cyclic modulating agent based on cadherin-related neuronal receptor cell adhesion recognition sequence
KTFHIDSVD

SEQ ID NO: 3827 - protein, 10 aa, Artificial Sequence
  Representative cyclic modulating agent based on cadherin-related neuronal receptor cell adhesion recognition sequence
KTFHIDSVSD

SEQ ID NO: 3828 - protein, 11 aa, Artificial Sequence
  Representative cyclic modulating agent based on cadherin-related neuronal receptor cell adhesion recognition sequence
KTFHIDSVSGD

SEQ ID NO: 3829 - protein, 5 aa, Artificial Sequence
  Representative cyclic modulating agent based on cadherin-related neuronal receptor cell adhesion recognition sequence
KDSND

SEQ ID NO: 3830 - protein, 6 aa, Artificial Sequence
  Representative cyclic modulating agent based on cadherin-related neuronal receptor cell adhesion recognition sequence
KDSNSD

SEQ ID NO: 3831 - protein, 7 aa, Artificial Sequence
  Representative cyclic modulating agent based on cadherin-related neuronal receptor cell adhesion recognition sequence
KDSNSGD

SEQ ID NO: 3832 - protein, 6 aa, Artificial Sequence
  Representative cyclic modulating agent based on cadherin-related neuronal receptor cell adhesion recognition sequence
KIDSND

SEQ ID NO: 3833 - protein, 7 aa, Artificial Sequence
  Representative cyclic modulating agent based on cadherin-related neuronal receptor cell adhesion recognition sequence
KIDSNSD

SEQ ID NO: 3834 - protein, 8 aa, Artificial Sequence
  Representative cyclic modulating agent based on cadherin-related neuronal receptor cell adhesion recognition sequence
KIDSNSGD

SEQ ID NO: 3835 - protein, 7 aa, Artificial Sequence
  Representative cyclic modulating agent based on cadherin-related neuronal receptor cell adhesion recognition sequence
KNIDSND

SEQ ID NO: 3836 - protein, 8 aa, Artificial Sequence
  Representative cyclic modulating agent based on cadherin-related neuronal receptor cell adhesion recognition sequence
KNIDSNSD

SEQ ID NO: 3837 - protein, 9 aa, Artificial Sequence
  Representative cyclic modulating agent based on cadherin-related neuronal receptor cell adhesion recognition sequence
KNIDSNSGD

SEQ ID NO: 3838 - protein, 8 aa, Artificial Sequence
  Representative cyclic modulating agent based on cadherin-related neuronal receptor cell adhesion recognition sequence
KFNIDSND

SEQ ID NO: 3839 - protein, 9 aa, Artificial Sequence
  Representative cyclic modulating agent based on cadherin-related neuronal receptor cell adhesion recognition sequence
KFNIDSNSD

SEQ ID NO: 3840 - protein, 10 aa, Artificial Sequence
  Representative cyclic modulating agent based on cadherin-related neuronal receptor cell adhesion recognition sequence
KFNIDSNSGD

SEQ ID NO: 3841 - protein, 9 aa, Artificial Sequence
  Representative cyclic modulating agent based on cadherin-related neuronal receptor cell adhesion recognition sequence
KAFNIDSND

SEQ ID NO: 3842 - protein, 9 aa, Artificial Sequence
  Representative cyclic modulating agent based on cadherin-related neuronal receptor cell adhesion recognition sequence
EFIINENTK

SEQ ID NO: 3843 - protein, 10 aa, Artificial Sequence
  Representative cyclic modulating agent based on cadherin-related neuronal receptor cell adhesion recognition sequence
KAFNIDSNSD

SEQ ID NO: 3844 - protein, 11 aa, Artificial Sequence
  Representative cyclic modulating agent based on cadherin-related neuronal receptor cell adhesion recognition sequence
KAFNIDSNSGD

SEQ ID NO: 3845 - protein, 5 aa, Artificial Sequence
  Representative cyclic modulating agent based on cadherin-related neuronal receptor cell adhesion recognition sequence
KDSSD

SEQ ID NO: 3846 - protein, 6 aa, Artificial Sequence
  Representative cyclic modulating agent based on cadherin-related neuronal receptor cell adhesion recognition sequence
KDSSSD

SEQ ID NO: 3847 - protein, 7 aa, Artificial Sequence
  Representative cyclic modulating agent based on cadherin-related neuronal receptor cell adhesion recognition sequence
KDSSSGD

SEQ ID NO: 3848 - protein, 6 aa, Artificial Sequence
  Representative cyclic modulating agent based on cadherin-related neuronal receptor cell adhesion recognition sequence
KIDSSD

SEQ ID NO: 3849 - protein, 7 aa, Artificial Sequence
  Representative cyclic modulating agent based on cadherin-related neuronal receptor cell adhesion recognition sequence
KIDSSSD

SEQ ID NO: 3850 - protein, 8 aa, Artificial Sequence
  Representative cyclic modulating agent based on cadherin-related neuronal receptor cell adhesion recognition sequence
KIDSSSGD

SEQ ID NO: 3851 - protein, 7 aa, Artificial Sequence
  Representative cyclic modulating agent based on cadherin-related neuronal receptor cell adhesion recognition sequence
KTIDSSD

SEQ ID NO: 3852 - protein, 8 aa, Artificial Sequence
  Representative cyclic modulating agent based on cadherin-related neuronal receptor cell adhesion recognition sequence
KTIDSSSD

SEQ ID NO: 3853 - protein, 9 aa, Artificial Sequence
  Representative cyclic modulating agent based on cadherin-related neuronal receptor cell adhesion recognition sequence
KTIDSSSGD

SEQ ID NO: 3854 - protein, 8 aa, Artificial Sequence
  Representative cyclic modulating agent based on cadherin-related neuronal receptor cell adhesion recognition sequence
KFTIDSSD

SEQ ID NO: 3855 - protein, 9 aa, Artificial Sequence
  Representative cyclic modulating agent based on cadherin-related neuronal receptor cell adhesion recognition sequence
KFTIDSSSD

SEQ ID NO: 3856 - protein, 10 aa, Artificial Sequence
  Representative cyclic modulating agent based on cadherin-related neuronal receptor cell adhesion recognition sequence
KFTIDSSSGD

SEQ ID NO: 3857 - protein, 9 aa, Artificial Sequence
  Representative cyclic modulating agent based on cadherin-related neuronal receptor cell adhesion recognition sequence
KKFTIDSSD

SEQ ID NO: 3858 - protein, 10 aa, Artificial Sequence
  Representative cyclic modulating agent based on cadherin-related neuronal receptor cell adhesion recognition sequence
KKFTIDSSSD

SEQ ID NO: 3859 - protein, 11 aa, Artificial Sequence
  Representative cyclic modulating agent based on cadherin-related neuronal receptor cell adhesion recognition sequence
KKFTIDSSSGD

SEQ ID NO: 3860 - protein, 5 aa, Artificial Sequence
  Representative cyclic modulating agent based on cadherin-related neuronal receptor cell adhesion recognition sequence
KDEKD

SEQ ID NO: 3861 - protein, 6 aa, Artificial Sequence
  Representative cyclic modulating agent based on cadherin-related neuronal receptor cell adhesion recognition sequence
KDEKND

SEQ ID NO: 3862 - protein, 7 aa, Artificial Sequence
  Representative cyclic modulating agent based on cadherin-related neuronal receptor cell adhesion recognition sequence
KDEKNGD

SEQ ID NO: 3863 - protein, 6 aa, Artificial Sequence
  Representative cyclic modulating agent based on cadherin-related neuronal receptor cell adhesion recognition sequence
KLDEKD

SEQ ID NO: 3864 - protein, 7 aa, Artificial Sequence
  Representative cyclic modulating agent based on cadherin-related neuronal receptor cell adhesion recognition sequence
KLDEKND

SEQ ID NO: 3865 - protein, 8 aa, Artificial Sequence
  Representative cyclic modulating agent based on cadherin-related neuronal receptor cell adhesion recognition sequence
KLDEKNGD

SEQ ID NO: 3866 - protein, 7 aa, Artificial Sequence
  Representative cyclic modulating agent based on cadherin-related neuronal receptor cell adhesion recognition sequence
KTLDEKD

SEQ ID NO: 3867 - protein, 8 aa, Artificial Sequence
  Representative cyclic modulating agent based on cadherin-related neuronal receptor cell adhesion recognition sequence
KTLDEKND

SEQ ID NO: 3868 - protein, 9 aa, Artificial Sequence
  Representative cyclic modulating agent based on cadherin-related neuronal receptor cell adhesion recognition sequence
KTLDEKNGD

SEQ ID NO: 3869 - protein, 8 aa, Artificial Sequence
  Representative cyclic modulating agent based on cadherin-related neuronal receptor cell adhesion recognition sequence
KFTLDEKD

SEQ ID NO: 3870 - protein, 9 aa, Artificial Sequence
  Representative cyclic modulating agent based on cadherin-related neuronal receptor cell adhesion recognition sequence
KFTLDEKND

SEQ ID NO: 3871 - protein, 10 aa, Artificial Sequence
  Representative cyclic modulating agent based on cadherin-related neuronal receptor cell adhesion recognition sequence
KFTLDEKNGD

SEQ ID NO: 3872 - protein, 9 aa, Artificial Sequence
  Representative cyclic modulating agent based on cadherin-related neuronal receptor cell adhesion recognition sequence
KLFTLDEKD

SEQ ID NO: 3873 - protein, 10 aa, Artificial Sequence
  Representative cyclic modulating agent based on cadherin-related neuronal receptor cell adhesion recognition sequence
KLFTLDEKND

SEQ ID NO: 3874 - protein, 11 aa, Artificial Sequence
  Representative cyclic modulating agent based on cadherin-related neuronal receptor cell adhesion recognition sequence
KLFTLDEKNGD

SEQ ID NO: 3875 - protein, 5 aa, Artificial Sequence
  Representative cyclic modulating agent based on cadherin-related neuronal receptor cell adhesion recognition sequence
KNEKD

SEQ ID NO: 3876 - protein, 6 aa, Artificial Sequence
  Representative cyclic modulating agent based on cadherin-related neuronal receptor cell adhesion recognition sequence
KNEKTD

SEQ ID NO: 3877 - protein, 7 aa, Artificial Sequence
  Representative cyclic modulating agent based on cadherin-related neuronal receptor cell adhesion recognition sequence
KNEKTGD

SEQ ID NO: 3878 - protein, 6 aa, Artificial Sequence
  Representative cyclic modulating agent based on cadherin-related neuronal receptor cell adhesion recognition sequence
KINEKD

SEQ ID NO: 3879 - protein, 7 aa, Artificial Sequence
  Representative cyclic modulating agent based on cadherin-related neuronal receptor cell adhesion recognition sequence
KINEKTD

SEQ ID NO: 3880 - protein, 8 aa, Artificial Sequence
  Representative cyclic modulating agent based on cadherin-related neuronal receptor cell adhesion recognition sequence
KINEKTGD

SEQ ID NO: 3881 - protein, 7 aa, Artificial Sequence
  Representative cyclic modulating agent based on cadherin-related neuronal receptor cell adhesion recognition sequence
KLINEKD

SEQ ID NO: 3882 - protein, 8 aa, Artificial Sequence
  Representative cyclic modulating agent based on cadherin-related neuronal receptor cell adhesion recognition sequence
KLINEKTD

SEQ ID NO: 3883 - protein, 9 aa, Artificial Sequence
  Representative cyclic modulating agent based on cadherin-related neuronal receptor cell adhesion recognition sequence
KLINEKTGD

SEQ ID NO: 3884 - protein, 8 aa, Artificial Sequence
  Representative cyclic modulating agent based on cadherin-related neuronal receptor cell adhesion recognition sequence
KFLINEKD

SEQ ID NO: 3885 - protein, 9 aa, Artificial Sequence
  Representative cyclic modulating agent based on cadherin-related neuronal receptor cell adhesion recognition sequence
KFLINEKTD

SEQ ID NO: 3886 - protein, 10 aa, Artificial Sequence
  Representative cyclic modulating agent based on cadherin-related neuronal receptor cell adhesion recognition sequence
KFLINEKTGD

SEQ ID NO: 3887 - protein, 9 aa, Artificial Sequence
  Representative cyclic modulating agent based on cadherin-related neuronal receptor cell adhesion recognition sequence
KKFLINEKD

SEQ ID NO: 3888 - protein, 10 aa, Artificial Sequence
  Representative cyclic modulating agent based on cadherin-related neuronal receptor cell adhesion recognition sequence
KKFLINEKTD

SEQ ID NO: 3889 - protein, 11 aa, Artificial Sequence
  Representative cyclic modulating agent based on cadherin-related neuronal receptor cell adhesion recognition sequence
KKFLINEKTGD

SEQ ID NO: 3890 - protein, 10 aa, Artificial Sequence
  Representative cyclic modulating agent based on cadherin-6 cell adhesion recognition sequence
ELFIINENTK

SEQ ID NO: 3891 - protein, 7 aa, Artificial Sequence
  Representative cyclic modulating agent based on cadherin-6 cell adhesion recognition sequence
ENENTGK

SEQ ID NO: 3892 - protein, 8 aa, Artificial Sequence
  Representative cyclic modulating agent based on cadherin-6 cell adhesion recognition sequence
EINENTGK

SEQ ID NO: 3893 - protein, 9 aa, Artificial Sequence
  Representative cyclic modulating agent based on cadherin-6 cell adhesion recognition sequence
EIINENTGK

SEQ ID NO: 3894 - protein, 10 aa, Artificial Sequence
  Representative cyclic modulating agent based on cadherin-6 cell adhesion recognition sequence
EFIINENTGK

SEQ ID NO: 3895 - protein, 11 aa, Artificial Sequence
  Representative cyclic modulating agent based on cadherin-6 cell adhesion recognition sequence
ELFIINENTGK

SEQ ID NO: 3896 - protein, 8 aa, Artificial Sequence
  Representative cyclic modulating agent based on cadherin-7 cell adhesion recognition sequence
DIIDENTK

SEQ ID NO: 3897 - protein, 9 aa, Artificial Sequence
  Representative cyclic modulating agent based on cadherin-7 cell adhesion recognition sequence
DFIIDENTK

SEQ ID NO: 3898 - protein, 10 aa, Artificial Sequence
  Representative cyclic modulating agent based on cadherin-7 cell adhesion recognition sequence
DIFIIDENTK

SEQ ID NO: 3899 - protein, 7 aa, Artificial Sequence
  Representative cyclic modulating agent based on cadherin-7 cell adhesion recognition sequence
DDENTGK

SEQ ID NO: 3900 - protein, 8 aa, Artificial Sequence
  Representative cyclic modulating agent based on cadherin-7 cell adhesion recognition sequence
DIDENTGK

SEQ ID NO: 3901 - protein, 9 aa, Artificial Sequence
  Representative cyclic modulating agent based on cadherin-7 cell adhesion recognition sequence
DIIDENTGK

SEQ ID NO: 3902 - protein, 10 aa, Artificial Sequence
  Representative cyclic modulating agent based on cadherin-7 cell adhesion recognition sequence
DFIIDENTGK

SEQ ID NO: 3903 - protein, 11 aa, Artificial Sequence
  Representative cyclic modulating agent based on cadherin-7 cell adhesion recognition sequence
DIFIIDENTGK

SEQ ID NO: 3904 - protein, 6 aa, Artificial Sequence
  Representative cyclic modulating agent based on cadherin-7 cell adhesion recognition sequence
EDENTK

SEQ ID NO: 3905 - protein, 7 aa, Artificial Sequence
  Representative cyclic modulating agent based on cadherin-7 cell adhesion recognition sequence
EIDENTK

SEQ ID NO: 3906 - protein, 8 aa, Artificial Sequence
  Representative cyclic modulating agent based on cadherin-7 cell adhesion recognition sequence
EIIDENTK

SEQ ID NO: 3907 - protein, 9 aa, Artificial Sequence
  Representative cyclic modulating agent based on cadherin-7 cell adhesion recognition sequence
EFIIDENTK

SEQ ID NO: 3908 - protein, 10 aa, Artificial Sequence
  Representative cyclic modulating agent based on cadherin-7 cell adhesion recognition sequence
EIFIIDENTK

SEQ ID NO: 3909 - protein, 7 aa, Artificial Sequence
  Representative cyclic modulating agent based on cadherin-7 cell adhesion recognition sequence
EDENTGK

SEQ ID NO: 3910 - protein, 8 aa, Artificial Sequence
  Representative cyclic modulating agent based on cadherin-7 cell adhesion recognition sequence
EIDENTGK

SEQ ID NO: 3911 - protein, 9 aa, Artificial Sequence
  Representative cyclic modulating agent based on cadherin-7 cell adhesion recognition sequence
EIIDENTGK

SEQ ID NO: 3912 - protein, 10 aa, Artificial Sequence
  Representative cyclic modulating agent based on cadherin-7 cell adhesion recognition sequence
EFIIDENTGK

SEQ ID NO: 3913 - protein, 11 aa, Artificial Sequence
  Representative cyclic modulating agent based on cadherin-7 cell adhesion recognition sequence
EIFIIDENTGK

SEQ ID NO: 3914 - protein, 6 aa, Artificial Sequence
  Representative cyclic modulating agent based on cadherin-8 cell adhesion recognition sequence
ENDVTK

SEQ ID NO: 3915 - protein, 7 aa, Artificial Sequence
  Representative cyclic modulating agent based on cadherin-8 cell adhesion recognition sequence
EINDVTK

SEQ ID NO: 3916 - protein, 8 aa, Artificial Sequence
  Representative cyclic modulating agent based on cadherin-8 cell adhesion recognition sequence
EQINDVTK

SEQ ID NO: 3917 - protein, 9 aa, Artificial Sequence
  Representative cyclic modulating agent based on cadherin-8 cell adhesion recognition sequence
EFQINDVTK

SEQ ID NO: 3918 - protein, 10 aa, Artificial Sequence
  Representative cyclic modulating agent based on cadherin-8 cell adhesion recognition sequence
EIFQINDVTK

SEQ ID NO: 3919 - protein, 7 aa, Artificial Sequence
  Representative cyclic modulating agent based on cadherin-8 cell adhesion recognition sequence
ENDVTGK

SEQ ID NO: 3920 - protein, 8 aa, Artificial Sequence
  Representative cyclic modulating agent based on cadherin-8 cell adhesion recognition sequence
EINDVTGK

SEQ ID NO: 3921 - protein, 9 aa, Artificial Sequence
  Representative cyclic modulating agent based on cadherin-8 cell adhesion recognition sequence
EQINDVTGK

SEQ ID NO: 3922 - protein, 10 aa, Artificial Sequence
  Representative cyclic modulating agent based on cadherin-8 cell adhesion recognition sequence
EFQINDVTGK

SEQ ID NO: 3923 - protein, 11 aa, Artificial Sequence
  Representative cyclic modulating agent based on cadherin-8 cell adhesion recognition sequence
EIFQINDVTGK

SEQ ID NO: 3924 - protein, 6 aa, Artificial Sequence
  Representative cyclic modulating agent based on cadherin-8 cell adhesion recognition sequence
DNDVTK

SEQ ID NO: 3925 - protein, 7 aa, Artificial Sequence
  Representative cyclic modulating agent based on cadherin-8 cell adhesion recognition sequence
DINDVTK

SEQ ID NO: 3926 - protein, 8 aa, Artificial Sequence
  Representative cyclic modulating agent based on cadherin-8 cell adhesion recognition sequence
DQINDVTK

SEQ ID NO: 3927 - protein, 9 aa, Artificial Sequence
  Representative cyclic modulating agent based on cadherin-8 cell adhesion recognition sequence
DFQINDVTK

SEQ ID NO: 3928 - protein, 10 aa, Artificial Sequence
  Representative cyclic modulating agent based on cadherin-8 cell adhesion recognition sequence
DIFQINDVTK

SEQ ID NO: 3929 - protein, 7 aa, Artificial Sequence
  Representative cyclic modulating agent based on cadherin-8 cell adhesion recognition sequence
DNDVTGK

SEQ ID NO: 3930 - protein, 8 aa, Artificial Sequence
  Representative cyclic modulating agent based on cadherin-8 cell adhesion recognition sequence
DINDVTGK

SEQ ID NO: 3931 - protein, 9 aa, Artificial Sequence
  Representative cyclic modulating agent based on cadherin-8 cell adhesion recognition sequence
DQINDVTGK

SEQ ID NO: 3932 - protein, 10 aa, Artificial Sequence
  Representative cyclic modulating agent based on cadherin-8 cell adhesion recognition sequence
DFQINDVTGK

SEQ ID NO: 3933 - protein, 11 aa, Artificial Sequence
  Representative cyclic modulating agent based on cadherin-8 cell adhesion recognition sequence
DIFQINDVTGK

SEQ ID NO: 3934 - protein, 8 aa, Artificial Sequence
  Representative cyclic modulating agent based on cadherin-12 cell adhesion recognition sequence
DTIDETTK

SEQ ID NO: 3935 - protein, 9 aa, Artificial Sequence
  Representative cyclic modulating agent based on cadherin-12 cell adhesion recognition sequence
DFTIDETTK

SEQ ID NO: 3936 - protein, 10 aa, Artificial Sequence
  Representative cyclic modulating agent based on cadherin-12 cell adhesion recognition sequence
DVFTIDETTK

SEQ ID NO: 3937 - protein, 7 aa, Artificial Sequence
  Representative cyclic modulating agent based on cadherin-12 cell adhesion recognition sequence
DDETTGK

SEQ ID NO: 3938 - protein, 8 aa, Artificial Sequence
  Representative cyclic modulating agent based on cadherin-12 cell adhesion recognition sequence
DIDETTGK

SEQ ID NO: 3939 - protein, 9 aa, Artificial Sequence
  Representative cyclic modulating agent based on cadherin-12 cell adhesion recognition sequence
DTIDETTGK

SEQ ID NO: 3940 - protein, 10 aa, Artificial Sequence
  Representative cyclic modulating agent based on cadherin-12 cell adhesion recognition sequence
DFTIDETTGK

SEQ ID NO: 3941 - protein, 11 aa, Artificial Sequence
  Representative cyclic modulating agent based on cadherin-12 cell adhesion recognition sequence
DVFTIDETTGK

SEQ ID NO: 3942 - protein, 6 aa, Artificial Sequence
  Representative cyclic modulating agent based on cadherin-12 cell adhesion recognition sequence
EDETTK

SEQ ID NO: 3943 - protein, 7 aa, Artificial Sequence
  Representative cyclic modulating agent based on cadherin-12 cell adhesion recognition sequence
EIDETTK

SEQ ID NO: 3944 - protein, 8 aa, Artificial Sequence
  Representative cyclic modulating agent based on cadherin-12 cell adhesion recognition sequence
ETIDETTK

SEQ ID NO: 3945 - protein, 9 aa, Artificial Sequence
  Representative cyclic modulating agent based on cadherin-12 cell adhesion recognition sequence
EFTIDETTK

SEQ ID NO: 3946 - protein, 10 aa, Artificial Sequence
  Representative cyclic modulating agent based on cadherin-12 cell adhesion recognition sequence
DVFTIDETTK

SEQ ID NO: 3947 - protein, 7 aa, Artificial Sequence
  Representative cyclic modulating agent based on cadherin-12 cell adhesion recognition sequence
EDETTGK

SEQ ID NO: 3948 - protein, 8 aa, Artificial Sequence
  Representative cyclic modulating agent based on cadherin-12 cell adhesion recognition sequence
EIDETTGK

SEQ ID NO: 3949 - protein, 9 aa, Artificial Sequence
  Representative cyclic modulating agent based on cadherin-12 cell adhesion recognition sequence
ETIDETTGK

SEQ ID NO: 3950 - protein, 10 aa, Artificial Sequence
  Representative cyclic modulating agent based on cadherin-12 cell adhesion recognition sequence
EFTIDETTGK

SEQ ID NO: 3951 - protein, 11 aa, Artificial Sequence
  Representative cyclic modulating agent based on cadherin-12 cell adhesion recognition sequence
EVFTIDETTGK

SEQ ID NO: 3952 - protein, 7 aa, Artificial Sequence
  Representative cyclic modulating agent based on cadherin-14 cell adhesion recognition sequence
EIDDTTK

SEQ ID NO: 3953 - protein, 8 aa, Artificial Sequence
  Representative cyclic modulating agent based on cadherin-14 cell adhesion recognition sequence
EIIDDTTK

SEQ ID NO: 3954 - protein, 9 aa, Artificial Sequence
  Representative cyclic modulating agent based on cadherin-14 cell adhesion recognition sequence
EFIIDDTTK

SEQ ID NO: 3955 - protein, 10 aa, Artificial Sequence
  Representative cyclic modulating agent based on cadherin-14 cell adhesion recognition sequence
EIFIIDDTTK

SEQ ID NO: 3956 - protein, 7 aa, Artificial Sequence
  Representative cyclic modulating agent based on cadherin-14 cell adhesion recognition sequence
EDDTTGK

SEQ ID NO: 3957 - protein, 8 aa, Artificial Sequence
  Representative cyclic modulating agent based on cadherin-14 cell adhesion recognition sequence
EIDDTTGK

SEQ ID NO: 3958 - protein, 9 aa, Artificial Sequence
  Representative cyclic modulating agent based on cadherin-14 cell adhesion recognition sequence
EIIDDTTGK

SEQ ID NO: 3959 - protein, 10 aa, Artificial Sequence
  Representative cyclic modulating agent based on cadherin-14 cell adhesion recognition sequence
EFIIDDTTGK

SEQ ID NO: 3960 - protein, 11 aa, Artificial Sequence
  Representative cyclic modulating agent based on cadherin-14 cell adhesion recognition sequence
EIFIIDDTTGK

SEQ ID NO: 3961 - protein, 6 aa, Artificial Sequence
  Representative cyclic modulating agent based on cadherin-14 cell adhesion recognition sequence
DDDTTK

SEQ ID NO: 3962 - protein, 7 aa, Artificial Sequence
  Representative cyclic modulating agent based on cadherin-14 cell adhesion recognition sequence
DIDDTTK

SEQ ID NO: 3963 - protein, 9 aa, Artificial Sequence
  Representative cyclic modulating agent based on cadherin-14 cell adhesion recognition sequence
DFIIDDTTK

SEQ ID NO: 3964 - protein, 10 aa, Artificial Sequence
  Representative cyclic modulating agent based on cadherin-14 cell adhesion recognition sequence
DIFIIDDTTK

SEQ ID NO: 3965 - protein, 7 aa, Artificial Sequence
  Representative cyclic modulating agent based on cadherin-14 cell adhesion recognition sequence
DDDTTGK

SEQ ID NO: 3966 - protein, 8 aa, Artificial Sequence
  Representative cyclic modulating agent based on cadherin-14 cell adhesion recognition sequence
DIDDTTGK

SEQ ID NO: 3967 - protein, 9 aa, Artificial Sequence
  Representative cyclic modulating agent based on cadherin-14 cell adhesion recognition sequence
DIIDDTTGK

SEQ ID NO: 3968 - protein, 10 aa, Artificial Sequence
  Representative cyclic modulating agent based on cadherin-14 cell adhesion recognition sequence
DFIIDDTTGK

SEQ ID NO: 3969 - protein, 11 aa, Artificial Sequence
  Representative cyclic modulating agent based on cadherin-14 cell adhesion recognition sequence
DIFIIDDTTGK

SEQ ID NO: 3970 - protein, 6 aa, Artificial Sequence
  Representative cyclic modulating agent based on cadherin-14 cell adhesion recognition sequence
CDPKTC

SEQ ID NO: 3971 - protein, 7 aa, Artificial Sequence
  Representative cyclic modulating agent based on cadherin-14 cell adhesion recognition sequence
CDPKTGC

SEQ ID NO: 3972 - protein, 6 aa, Artificial Sequence
  Representative cyclic modulating agent based on cadherin-14 cell adhesion recognition sequence
CIDANC

SEQ ID NO: 3973 - protein, 7 aa, Artificial Sequence
  Representative cyclic modulating agent based on cadherin-14 cell adhesion recognition sequence
CNIDANC

SEQ ID NO: 3974 - protein, 8 aa, Artificial Sequence
  Representative cyclic modulating agent based on cadherin-14 cell adhesion recognition sequence
CFNIDANC

SEQ ID NO: 3975 - protein, 6 aa, Artificial Sequence
  Representative cyclic modulating agent based on cadherin-14 cell adhesion recognition sequence
EIDANK

SEQ ID NO: 3976 - protein, 7 aa, Artificial Sequence
  Representative cyclic modulating agent based on cadherin-14 cell adhesion recognition sequence
ENIDANK

SEQ ID NO: 3977 - protein, 8 aa, Artificial Sequence
  Representative cyclic modulating agent based on cadherin-14 cell adhesion recognition sequence
EFNIDANK

SEQ ID NO: 3978 - protein, 5 aa, Artificial Sequence
  Representative cyclic modulating agent based on cadherin-14 cell adhesion recognition sequence
KDPKD

SEQ ID NO: 3979 - protein, 6 aa, Artificial Sequence
  Representative cyclic modulating agent based on cadherin-14 cell adhesion recognition sequence
KDPKTD

SEQ ID NO: 3980 - protein, 7 aa, Artificial Sequence
  Representative cyclic modulating agent based on cadherin-14 cell adhesion recognition sequence
KDPKTGD

SEQ ID NO: 3981 - protein, 5 aa, Artificial Sequence
  Representative cyclic modulating agent based on cadherin-14 cell adhesion recognition sequence
KDAND

SEQ ID NO: 3982 - protein, 6 aa, Artificial Sequence
  Representative cyclic modulating agent based on cadherin-14 cell adhesion recognition sequence
KIDAND

SEQ ID NO: 3983 - protein, 7 aa, Artificial Sequence
  Representative cyclic modulating agent based on cadherin-14 cell adhesion recognition sequence
KNIDAND

SEQ ID NO: 3984 - protein, 6 aa, Artificial Sequence
  Representative cyclic modulating agent based on cadherin-14 cell adhesion recognition sequence
DIDANK

SEQ ID NO: 3985 - protein, 7 aa, Artificial Sequence
  Representative cyclic modulating agent based on cadherin-14 cell adhesion recognition sequence
DNIDANK

SEQ ID NO: 3986 - protein, 8 aa, Artificial Sequence
  Representative cyclic modulating agent based on cadherin-14 cell adhesion recognition sequence
DFNIDANK

SEQ ID NO: 3987 - protein, 9 aa, Artificial Sequence
  Representative cyclic modulating agent based on cadherin-14 cell adhesion recognition sequence
DFNIDANTK

SEQ ID NO: 3988 - protein, 5 aa, Artificial Sequence
  Representative cyclic modulating agent based on cadherin-14 cell adhesion recognition sequence
KDPKE

SEQ ID NO: 3989 - protein, 6 aa, Artificial Sequence
  Representative cyclic modulating agent based on cadherin-14 cell adhesion recognition sequence
KDPKTE

SEQ ID NO: 3990 - protein, 7 aa, Artificial Sequence
  Representative cyclic modulating agent based on cadherin-14 cell adhesion recognition sequence
KDPKTGE

SEQ ID NO: 3991 - protein, 6 aa, Artificial Sequence
  Representative cyclic modulating agent based on cadherin-14 cell adhesion recognition sequence
KIDANE

SEQ ID NO: 3992 - protein, 7 aa, Artificial Sequence
  Representative cyclic modulating agent based on cadherin-14 cell adhesion recognition sequence
KNIDANE

SEQ ID NO: 3993 - protein, 8 aa, Artificial Sequence
  Representative cyclic modulating agent based on cadherin-14 cell adhesion recognition sequence
KFNIDANE

SEQ ID NO: 3994 - protein, 8 aa, Artificial Sequence
  Representative cyclic modulating agent based on cadherin-15 cell adhesion recognition sequence
DSIDKFTK

SEQ ID NO: 3995 - protein, 9 aa, Artificial Sequence
  Representative cyclic modulating agent based on cadherin-15 cell adhesion recognition sequence
DFSIDKFTK

SEQ ID NO: 3996 - protein, 10 aa, Artificial Sequence
  Representative cyclic modulating agent based on cadherin-15 cell adhesion recognition sequence
DVFSIDKFTK

SEQ ID NO: 3997 - protein, 6 aa, Artificial Sequence
  Representative cyclic modulating agent based on cadherin-15 cell adhesion recognition sequence
DDKTGK

SEQ ID NO: 3998 - protein, 8 aa, Artificial Sequence
  Representative cyclic modulating agent based on cadherin-15 cell adhesion recognition sequence
DIDKFTGK

SEQ ID NO: 3999 - protein, 9 aa, Artificial Sequence
  Representative cyclic modulating agent based on cadherin-15 cell adhesion recognition sequence
DSIDKFTGK

SEQ ID NO: 4000 - protein, 10 aa, Artificial Sequence
  Representative cyclic modulating agent based on cadherin-15 cell adhesion recognition sequence
DFSIDKFTGK

SEQ ID NO: 4001 - protein, 11 aa, Artificial Sequence
  Representative cyclic modulating agent based on cadherin-15 cell adhesion recognition sequence
DVFSIDKFTGK

SEQ ID NO: 4002 - protein, 6 aa, Artificial Sequence
  Representative cyclic modulating agent based on cadherin-15 cell adhesion recognition sequence
EDKFTK

SEQ ID NO: 4003 - protein, 7 aa, Artificial Sequence
  Representative cyclic modulating agent based on cadherin-15 cell adhesion recognition sequence
EIDKFTK

SEQ ID NO: 4004 - protein, 8 aa, Artificial Sequence
  Representative cyclic modulating agent based on cadherin-15 cell adhesion recognition sequence
ESIDKFTK

SEQ ID NO: 4005 - protein, 9 aa, Artificial Sequence
  Representative cyclic modulating agent based on cadherin-15 cell adhesion recognition sequence
EFSIDKFTK

SEQ ID NO: 4006 - protein, 10 aa, Artificial Sequence
  Representative cyclic modulating agent based on cadherin-15 cell adhesion recognition sequence
EVFSIDKFTK

SEQ ID NO: 4007 - protein, 7 aa, Artificial Sequence
  Representative cyclic modulating agent based on cadherin-15 cell adhesion recognition sequence
EDKFTGK

SEQ ID NO: 4008 - protein, 8 aa, Artificial Sequence
  Representative cyclic modulating agent based on cadherin-15 cell adhesion recognition sequence
EIDKFTGK

SEQ ID NO: 4009 - protein, 10 aa, Artificial Sequence
  Representative cyclic modulating agent based on cadherin-15 cell adhesion recognition sequence
EFSIDKFTGK

SEQ ID NO: 4010 - protein, 11 aa, Artificial Sequence
  Representative cyclic modulating agent based on cadherin-15 cell adhesion recognition sequence
EVFSIDKFTGK

SEQ ID NO: 4011 - protein, 6 aa, Artificial Sequence
  Representative cyclic modulating agent based on T-cadherin cell adhesion recognition sequence
DNENTK

SEQ ID NO: 4012 - protein, 7 aa, Artificial Sequence
  Representative cyclic modulating agent based on T-cadherin cell adhesion recognition sequence
DINENTK

SEQ ID NO: 4013 - protein, 8 aa, Artificial Sequence
  Representative cyclic modulating agent based on T-cadherin cell adhesion recognition sequence
DRINENTK

SEQ ID NO: 4014 - protein, 9 aa, Artificial Sequence
  Representative cyclic modulating agent based on T-cadherin cell adhesion recognition sequence
DFRINENTK

SEQ ID NO: 4015 - protein, 10 aa, Artificial Sequence
  Representative cyclic modulating agent based on T-cadherin cell adhesion recognition sequence
DIFRINENTK

SEQ ID NO: 4016 - protein, 7 aa, Artificial Sequence
  Representative cyclic modulating agent based on T-cadherin cell adhesion recognition sequence
DNENTGK

SEQ ID NO: 4017 - protein, 8 aa, Artificial Sequence
  Representative cyclic modulating agent based on T-cadherin cell adhesion recognition sequence
DINENTGK

SEQ ID NO: 4018 - protein, 9 aa, Artificial Sequence
  Representative cyclic modulating agent based on T-cadherin cell adhesion recognition sequence
DRINENTGK

SEQ ID NO: 4019 - protein, 10 aa, Artificial Sequence
  Representative cyclic modulating agent based on T-cadherin cell adhesion recognition sequence
DFRINENTGK

SEQ ID NO: 4020 - protein, 11 aa, Artificial Sequence
  Representative cyclic modulating agent based on T-cadherin cell adhesion recognition sequence
DIFRINENTGK

SEQ ID NO: 4021 - protein, 6 aa, Artificial Sequence
  Representative cyclic modulating agent based on T-cadherin cell adhesion recognition sequence
ENENTK

SEQ ID NO: 4022 - protein, 7 aa, Artificial Sequence
  Representative cyclic modulating agent based on T-cadherin cell adhesion recognition sequence
EINENTK

SEQ ID NO: 4023 - protein, 8 aa, Artificial Sequence
  Representative cyclic modulating agent based on T-cadherin cell adhesion recognition sequence
ERINENTK

SEQ ID NO: 4024 - protein, 9 aa, Artificial Sequence
  Representative cyclic modulating agent based on T-cadherin cell adhesion recognition sequence
EFRINENTK

SEQ ID NO: 4025 - protein, 10 aa, Artificial Sequence
  Representative cyclic modulating agent based on T-cadherin cell adhesion recognition sequence
EIFRINENTK

SEQ ID NO: 4026 - protein, 7 aa, Artificial Sequence
  Representative cyclic modulating agent based on T-cadherin cell adhesion recognition sequence
ENENTGK

SEQ ID NO: 4027 - protein, 8 aa, Artificial Sequence
  Representative cyclic modulating agent based on T-cadherin cell adhesion recognition sequence
EINENTGK

SEQ ID NO: 4028 - protein, 9 aa, Artificial Sequence
  Representative cyclic modulating agent based on T-cadherin cell adhesion recognition sequence
ERINENTGK

SEQ ID NO: 4029 - protein, 10 aa, Artificial Sequence
  Representative cyclic modulating agent based on T-cadherin cell adhesion recognition sequence
EFRINENTGK

SEQ ID NO: 4030 - protein, 11 aa, Artificial Sequence
  Representative cyclic modulating agent based on T-cadherin cell adhesion recognition sequence
EIFRINENTGK

SEQ ID NO: 4031 - protein, 6 aa, Artificial Sequence
  Representative cyclic modulating agent based on T-cadherin cell adhesion recognition sequence
VNENTG

SEQ ID NO: 4032 - protein, 7 aa, Artificial Sequence
  Representative cyclic modulating agent based on T-cadherin cell adhesion recognition sequence
RINENTG

SEQ ID NO: 4033 - protein, 6 aa, Artificial Sequence
  Representative cyclic modulating agent based on T-cadherin cell adhesion recognition sequence
FRINEN

SEQ ID NO: 4034 - protein, 7 aa, Artificial Sequence
  Representative cyclic modulating agent based on T-cadherin cell adhesion recognition sequence
FRINENT

SEQ ID NO: 4035 - protein, 8 aa, Artificial Sequence
  Representative cyclic modulating agent based on T-cadherin cell adhesion recognition sequence
FRINENTG

SEQ ID NO: 4036 - protein, 7 aa, Artificial Sequence
  Representative cyclic modulating agent based on T-cadherin cell adhesion recognition sequence
IFRINEN

SEQ ID NO: 4037 - protein, 8 aa, Artificial Sequence
  Representative cyclic modulating agent based on T-cadherin cell adhesion recognition sequence
IFRINENT

SEQ ID NO: 4038 - protein, 9 aa, Artificial Sequence
  Representative cyclic modulating agent based on T-cadherin cell adhesion recognition sequence
IFRINENTG

SEQ ID NO: 4039 - protein, 5 aa, Artificial Sequence
  Representative cyclic modulating agent based on PB-cadherin cell adhesion recognition sequence
CDELC

SEQ ID NO: 4040 - protein, 6 aa, Artificial Sequence
  Representative cyclic modulating agent based on PB-cadherin cell adhesion recognition sequence
CDELTC

SEQ ID NO: 4041 - protein, 7 aa, Artificial Sequence
  Representative cyclic modulating agent based on PB-cadherin cell adhesion recognition sequence
CDELTGC

SEQ ID NO: 4042 - protein, 6 aa, Artificial Sequence
  Representative cyclic modulating agent based on PB-cadherin cell adhesion recognition sequence
CIDELC

SEQ ID NO: 4043 - protein, 7 aa, Artificial Sequence
  Representative cyclic modulating agent based on PB-cadherin cell adhesion recognition sequence
CIDELTC

SEQ ID NO: 4044 - protein, 8 aa, Artificial Sequence
  Representative cyclic modulating agent based on PB-cadherin cell adhesion recognition sequence
CIDELTGC

SEQ ID NO: 4045 - protein, 5 aa, Artificial Sequence
  Representative cyclic modulating agent based on PB-cadherin cell adhesion recognition sequence
CDPKC

SEQ ID NO: 4046 - protein, 6 aa, Artificial Sequence
  Representative cyclic modulating agent based on PB-cadherin cell adhesion recognition sequence
CDPKTC

SEQ ID NO: 4047 - protein, 7 aa, Artificial Sequence
  Representative cyclic modulating agent based on PB-cadherin cell adhesion recognition sequence
CDPKTGC

SEQ ID NO: 4048 - protein, 6 aa, Artificial Sequence
  Representative cyclic modulating agent based on PB-cadherin cell adhesion recognition sequence
CVDPKC

SEQ ID NO: 4049 - protein, 7 aa, Artificial Sequence
  Representative cyclic modulating agent based on PB-cadherin cell adhesion recognition sequence
CVDPKTC

SEQ ID NO: 4050 - protein, 8 aa, Artificial Sequence
  Representative cyclic modulating agent based on PB-cadherin cell adhesion recognition sequence
CVDPKTGC

SEQ ID NO: 4051 - protein, 4 aa, Artificial Sequence
  Representative linear modulating agent based on OB-cadherin cell adhesion recognition sequence
IDDK

SEQ ID NO: 4052 - protein, 9 aa, Artificial Sequence
  Representative linear modulating agent based on cadherin-related neuronal recepotr cell adhesion recognition sequence
KFLINEKTG

SEQ ID NO: 4053 - protein, 4 aa, Artificial Sequence
  Representative linear modulating agent based on Desmoglein-1 cell adhesion recognition sequence
RALN

SEQ ID NO: 4054 - protein, 5 aa, Artificial Sequence
  Representative linear modulating agent based on Desmoglein-1 cell adhesion recognition sequence
RALNS

SEQ ID NO: 4055 - protein, 6 aa, Artificial Sequence
  Representative linear modulating agent based on Desmoglein-1 cell adhesion recognition sequence
RALNSM

SEQ ID NO: 4056 - protein, 6 aa, Artificial Sequence
  Representative linear modulating agent based on Desmoglein-1 cell adhesion recognition sequence
RALNSL

SEQ ID NO: 4057 - protein, 7 aa, Artificial Sequence
  Representative linear modulating agent based on Desmoglein-1 cell adhesion recognition sequence
RALNSMG

SEQ ID NO: 4058 - protein, 7 aa, Artificial Sequence
  Representative linear modulating agent based on Desmoglein-1 cell adhesion recognition sequence
RALNSLG

SEQ ID NO: 4059 - protein, 4 aa, Artificial Sequence
  Representative linear modulating agent based on Desmoglein-1 cell adhesion recognition sequence
CRAL

SEQ ID NO: 4060 - protein, 5 aa, Artificial Sequence
  Representative linear modulating agent based on Desmoglein-1 cell adhesion recognition sequence
CRALN

SEQ ID NO: 4061 - protein, 6 aa, Artificial Sequence
  Representative linear modulating agent based on Desmoglein-1 cell adhesion recognition sequence
CRALNS

SEQ ID NO: 4062 - protein, 7 aa, Artificial Sequence
  Representative linear modulating agent based on Desmoglein-1 cell adhesion recognition sequence
CRALNSM

SEQ ID NO: 4063 - protein, 7 aa, Artificial Sequence
  Representative linear modulating agent based on Desmoglein-1 cell adhesion recognition sequence
CRALNSL

SEQ ID NO: 4064 - protein, 8 aa, Artificial Sequence
  Representative linear modulating agent based on Desmoglein-1 cell adhesion recognition sequence
CRALNSMG

SEQ ID NO: 4065 - protein, 8 aa, Artificial Sequence
  Representative linear modulating agent based on Desmoglein-1 cell adhesion recognition sequence
CRALNSLG

SEQ ID NO: 4066 - protein, 5 aa, Artificial Sequence
  Representative linear modulating agent based on Desmoglein-1 cell adhesion recognition sequence
YCRAL

SEQ ID NO: 4067 - protein, 6 aa, Artificial Sequence
  Representative linear modulating agent based on Desmoglein-1 cell adhesion recognition sequence
YCRALN

SEQ ID NO: 4068 - protein, 7 aa, Artificial Sequence
  Representative linear modulating agent based on Desmoglein-1 cell adhesion recognition sequence
YCRALNS

SEQ ID NO: 4069 - protein, 8 aa, Artificial Sequence
  Representative linear modulating agent based on Desmoglein-1 cell adhesion recognition sequence
YCRALNSM

SEQ ID NO: 4070 - protein, 8 aa, Artificial Sequence
  Representative linear modulating agent based on Desmoglein-1 cell adhesion recognition sequence
YCRALNSL

SEQ ID NO: 4071 - protein, 9 aa, Artificial Sequence
  Representative linear modulating agent based on Desmoglein-1 cell adhesion recognition sequence
YCRALNSMG

SEQ ID NO: 4072 - protein, 9 aa, Artificial Sequence
  Representative linear modulating agent based on Desmoglein-1 cell adhesion recognition sequence
YCRALNSLG

SEQ ID NO: 4073 - protein, 5 aa, Artificial Sequence
  Representative linear modulating agent based on Desmoglein-1 cell adhesion recognition sequence
IYRAL

SEQ ID NO: 4074 - protein, 6 aa, Artificial Sequence
  Representative linear modulating agent based on Desmoglein-1 cell adhesion recognition sequence
IYRALN

SEQ ID NO: 4075 - protein, 7 aa, Artificial Sequence
  Representative linear modulating agent based on Desmoglein-1 cell adhesion recognition sequence
IYRALNS

SEQ ID NO: 4076 - protein, 8 aa, Artificial Sequence
  Representative linear modulating agent based on Desmoglein-1 cell adhesion recognition sequence
IYRALNSM

SEQ ID NO: 4077 - protein, 8 aa, Artificial Sequence
  Representative linear modulating agent based on Desmoglein-1 cell adhesion recognition sequence
IYRALNSL

SEQ ID NO: 4078 - protein, 9 aa, Artificial Sequence
  Representative linear modulating agent based on Desmoglein-1 cell adhesion recognition sequence
IYRALNSMG

SEQ ID NO: 4079 - protein, 9 aa, Artificial Sequence
  Representative linear modulating agent based on Desmoglein-1 cell adhesion recognition sequence
IYRALNSLG

SEQ ID NO: 4080 - protein, 9 aa, Artificial Sequence
  Representative linear modulating agent based on Desmoglein-1 cell adhesion recognition sequence
IYRALNSMG

SEQ ID NO: 4081 - protein, 9 aa, Artificial Sequence
  Representative linear modulating agent based on Desmoglein-1 cell adhesion recognition sequence
IYRALNSLG

SEQ ID NO: 4082 - protein, 4 aa, Artificial Sequence
  Representative linear modulating agent based on Desmoglein-2 cell adhesion recognition sequence
YALD

SEQ ID NO: 4083 - protein, 5 aa, Artificial Sequence
  Representative linear modulating agent based on Desmoglein-2 cell adhesion recognition sequence
YALDA

SEQ ID NO: 4084 - protein, 6 aa, Artificial Sequence
  Representative linear modulating agent based on Desmoglein-2 cell adhesion recognition sequence
YALDAR

SEQ ID NO: 4085 - protein, 7 aa, Artificial Sequence
  Representative linear modulating agent based on Desmoglein-2 cell adhesion recognition sequence
YALDARG

SEQ ID NO: 4086 - protein, 4 aa, Artificial Sequence
  Representative linear modulating agent based on Desmoglein-2 cell adhesion recognition sequence
GYAL

SEQ ID NO: 4087 - protein, 5 aa, Artificial Sequence
  Representative linear modulating agent based on Desmoglein-2 cell adhesion recognition sequence
GYALD

SEQ ID NO: 4088 - protein, 6 aa, Artificial Sequence
  Representative linear modulating agent based on Desmoglein-2 cell adhesion recognition sequence
GYALDA

SEQ ID NO: 4089 - protein, 7 aa, Artificial Sequence
  Representative linear modulating agent based on Desmoglein-2 cell adhesion recognition sequence
GYALDAR

SEQ ID NO: 4090 - protein, 8 aa, Artificial Sequence
  Representative linear modulating agent based on Desmoglein-2 cell adhesion recognition sequence
GYALDARG

SEQ ID NO: 4091 - protein, 5 aa, Artificial Sequence
  Representative linear modulating agent based on Desmoglein-2 cell adhesion recognition sequence
TGYAL

SEQ ID NO: 4092 - protein, 6 aa, Artificial Sequence
  Representative linear modulating agent based on Desmoglein-2 cell adhesion recognition sequence
TGYALD

SEQ ID NO: 4093 - protein, 7 aa, Artificial Sequence
  Representative linear modulating agent based on Desmoglein-2 cell adhesion recognition sequence
TGYALDA

SEQ ID NO: 4094 - protein, 8 aa, Artificial Sequence
  Representative linear modulating agent based on Desmoglein-2 cell adhesion recognition sequence
TGYALDAR

SEQ ID NO: 4095 - protein, 9 aa, Artificial Sequence
  Representative linear modulating agent based on Desmoglein-2 cell adhesion recognition sequence
TGYALDARG

SEQ ID NO: 4096 - protein, 6 aa, Artificial Sequence
  Representative linear modulating agent based on Desmoglein-2 cell adhesion recognition sequence
LTGYAL

SEQ ID NO: 4097 - protein, 7 aa, Artificial Sequence
  Representative linear modulating agent based on Desmoglein-2 cell adhesion recognition sequence
LTGYALD

SEQ ID NO: 4098 - protein, 8 aa, Artificial Sequence
  Representative linear modulating agent based on Desmoglein-2 cell adhesion recognition sequence
LTGYALDA

SEQ ID NO: 4099 - protein, 9 aa, Artificial Sequence
  Representative linear modulating agent based on Desmoglein-2 cell adhesion recognition sequence
LTGYALDAR

SEQ ID NO: 4100 - protein, 10 aa, Artificial Sequence
  Representative linear modulating agent based on Desmoglein-2 cell adhesion recognition sequence
LTGYALDARG

SEQ ID NO: 4101 - protein, 10 aa, Artificial Sequence
  Representative linear modulating agent based on Desmoglein-2 cell adhesion recognition sequence
LTGYALDARG

SEQ ID NO: 4102 - protein, 5 aa, Artificial Sequence
  Representative linear modulating agent based on Desmoglein-3 cell adhesion recognition sequence
RALNA

SEQ ID NO: 4103 - protein, 6 aa, Artificial Sequence
  Representative linear modulating agent based on Desmoglein-3 cell adhesion recognition sequence
RALNAQ

SEQ ID NO: 4104 - protein, 6 aa, Artificial Sequence
  Representative linear modulating agent based on Desmoglein-3 cell adhesion recognition sequence
RALNAL

SEQ ID NO: 4105 - protein, 7 aa, Artificial Sequence
  Representative linear modulating agent based on Desmoglein-3 cell adhesion recognition sequence
RALNAQG

SEQ ID NO: 4106 - protein, 7 aa, Artificial Sequence
  Representative linear modulating agent based on Desmoglein-3 cell adhesion recognition sequence
RALNALG

SEQ ID NO: 4107 - protein, 4 aa, Artificial Sequence
  Representative linear modulating agent based on Desmoglein-3 cell adhesion recognition sequence
CRAL

SEQ ID NO: 4108 - protein, 5 aa, Artificial Sequence
  Representative linear modulating agent based on Desmoglein-3 cell adhesion recognition sequence
CRALN

SEQ ID NO: 4109 - protein, 6 aa, Artificial Sequence
  Representative linear modulating agent based on Desmoglein-3 cell adhesion recognition sequence
CRALNA

SEQ ID NO: 4110 - protein, 7 aa, Artificial Sequence
  Representative linear modulating agent based on Desmoglein-3 cell adhesion recognition sequence
CRALNAQ

SEQ ID NO: 4111 - protein, 7 aa, Artificial Sequence
  Representative linear modulating agent based on Desmoglein-3 cell adhesion recognition sequence
CRALNAL

SEQ ID NO: 4112 - protein, 8 aa, Artificial Sequence
  Representative linear modulating agent based on Desmoglein-3 cell adhesion recognition sequence
CRALNAQG

SEQ ID NO: 4113 - protein, 8 aa, Artificial Sequence
  Representative linear modulating agent based on Desmoglein-3 cell adhesion recognition sequence
CRALNALG

SEQ ID NO: 4114 - protein, 5 aa, Artificial Sequence
  Representative linear modulating agent based on Desmoglein-3 cell adhesion recognition sequence
TCRAL

SEQ ID NO: 4115 - protein, 6 aa, Artificial Sequence
  Representative linear modulating agent based on Desmoglein-3 cell adhesion recognition sequence
TCRALN

SEQ ID NO: 4116 - protein, 7 aa, Artificial Sequence
  Representative linear modulating agent based on Desmoglein-3 cell adhesion recognition sequence
TCRALNA

SEQ ID NO: 4117 - protein, 8 aa, Artificial Sequence
  Representative linear modulating agent based on Desmoglein-3 cell adhesion recognition sequence
TCRALNAQ

SEQ ID NO: 4118 - protein, 8 aa, Artificial Sequence
  Representative linear modulating agent based on Desmoglein-3 cell adhesion recognition sequence
TCRALNAL

SEQ ID NO: 4119 - protein, 9 aa, Artificial Sequence
  Representative linear modulating agent based on Desmoglein-3 cell adhesion recognition sequence
TCRALNAQG

SEQ ID NO: 4120 - protein, 9 aa, Artificial Sequence
  Representative linear modulating agent based on Desmoglein-3 cell adhesion recognition sequence
TCRALNALG

SEQ ID NO: 4121 - protein, 6 aa, Artificial Sequence
  Representative linear modulating agent based on Desmoglein-3 cell adhesion recognition sequence
ITCRAL

SEQ ID NO: 4122 - protein, 7 aa, Artificial Sequence
  Representative linear modulating agent based on Desmoglein-3 cell adhesion recognition sequence
ITCRALN

SEQ ID NO: 4123 - protein, 8 aa, Artificial Sequence
  Representative linear modulating agent based on Desmoglein-3 cell adhesion recognition sequence
ITCRALNA

SEQ ID NO: 4124 - protein, 9 aa, Artificial Sequence
  Representative linear modulating agent based on Desmoglein-3 cell adhesion recognition sequence
ITCRALNAQ

SEQ ID NO: 4125 - protein, 9 aa, Artificial Sequence
  Representative linear modulating agent based on Desmoglein-3 cell adhesion recognition sequence
ITCRALNAL

SEQ ID NO: 4126 - protein, 10 aa, Artificial Sequence
  Representative linear modulating agent based on Desmoglein-3 cell adhesion recognition sequence
ITCRALNAQG

SEQ ID NO: 4127 - protein, 10 aa, Artificial Sequence
  Representative linear modulating agent based on Desmoglein-3 cell adhesion recognition sequence
ITCRALNALG

SEQ ID NO: 4128 - protein, 10 aa, Artificial Sequence
  Representative linear modulating agent based on Desmoglein-3 cell adhesion recognition sequence
ITCRALNAQG

SEQ ID NO: 4129 - protein, 10 aa, Artificial Sequence
  Representative linear modulating agent based on Desmoglein-3 cell adhesion recognition sequence
ITCRALNALG

SEQ ID NO: 4130 - protein, 4 aa, Artificial Sequence
  Representative linear modulating agent based on Desmocollin-1 cell adhesion recognition sequence
YATT

SEQ ID NO: 4131 - protein, 5 aa, Artificial Sequence
  Representative linear modulating agent based on Desmocollin-1 cell adhesion recognition sequence
YATTA

SEQ ID NO: 4132 - protein, 6 aa, Artificial Sequence
  Representative linear modulating agent based on Desmocollin-1 cell adhesion recognition sequence
YATTAD

SEQ ID NO: 4133 - protein, 7 aa, Artificial Sequence
  Representative linear modulating agent based on Desmocollin-1 cell adhesion recognition sequence
YATTADG

SEQ ID NO: 4134 - protein, 4 aa, Artificial Sequence
  Representative linear modulating agent based on Desmocollin-1 cell adhesion recognition sequence
GYAT

SEQ ID NO: 4135 - protein, 5 aa, Artificial Sequence
  Representative linear modulating agent based on Desmocollin-1 cell adhesion recognition sequence
GYATT

SEQ ID NO: 4136 - protein, 6 aa, Artificial Sequence
  Representative linear modulating agent based on Desmocollin-1 cell adhesion recognition sequence
GYATTA

SEQ ID NO: 4137 - protein, 7 aa, Artificial Sequence
  Representative linear modulating agent based on Desmocollin-1 cell adhesion recognition sequence
GYATTAD

SEQ ID NO: 4138 - protein, 8 aa, Artificial Sequence
  Representative linear modulating agent based on Desmocollin-1 cell adhesion recognition sequence
GYATTADG

SEQ ID NO: 4139 - protein, 4 aa, Artificial Sequence
  Representative linear modulating agent based on Desmocollin-1 cell adhesion recognition sequence
AYAT

SEQ ID NO: 4140 - protein, 5 aa, Artificial Sequence
  Representative linear modulating agent based on Desmocollin-1 cell adhesion recognition sequence
AYATT

SEQ ID NO: 4141 - protein, 6 aa, Artificial Sequence
  Representative linear modulating agent based on Desmocollin-1 cell adhesion recognition sequence
AYATTA

SEQ ID NO: 4142 - protein, 7 aa, Artificial Sequence
  Representative linear modulating agent based on Desmocollin-1 cell adhesion recognition sequence
AYATTAD

SEQ ID NO: 4143 - protein, 8 aa, Artificial Sequence
  Representative linear modulating agent based on Desmocollin-1 cell adhesion recognition sequence
AYATTADG

SEQ ID NO: 4144 - protein, 5 aa, Artificial Sequence
  Representative linear modulating agent based on Desmocollin-1 cell adhesion recognition sequence
YGYAT

SEQ ID NO: 4145 - protein, 6 aa, Artificial Sequence
  Representative linear modulating agent based on Desmocollin-1 cell adhesion recognition sequence
YGYATT

SEQ ID NO: 4146 - protein, 7 aa, Artificial Sequence
  Representative linear modulating agent based on Desmocollin-1 cell adhesion recognition sequence
YGYATTA

SEQ ID NO: 4147 - protein, 8 aa, Artificial Sequence
  Representative linear modulating agent based on Desmocollin-1 cell adhesion recognition sequence
YGYATTAD

SEQ ID NO: 4148 - protein, 9 aa, Artificial Sequence
  Representative linear modulating agent based on Desmocollin-1 cell adhesion recognition sequence
YGYATTADG

SEQ ID NO: 4149 - protein, 5 aa, Artificial Sequence
  Representative linear modulating agent based on Desmocollin-1 cell adhesion recognition sequence
YAYAT

SEQ ID NO: 4150 - protein, 6 aa, Artificial Sequence
  Representative linear modulating agent based on Desmocollin-1 cell adhesion recognition sequence
YAYATT

SEQ ID NO: 4151 - protein, 7 aa, Artificial Sequence
  Representative linear modulating agent based on Desmocollin-1 cell adhesion recognition sequence
YAYATTA

SEQ ID NO: 4152 - protein, 8 aa, Artificial Sequence
  Representative linear modulating agent based on Desmocollin-1 cell adhesion recognition sequence
YAYATTAD

SEQ ID NO: 4153 - protein, 9 aa, Artificial Sequence
  Representative linear modulating agent based on Desmocollin-1 cell adhesion recognition sequence
YAYATTADG

SEQ ID NO: 4154 - protein, 6 aa, Artificial Sequence
  Representative linear modulating agent based on Desmocollin-1 cell adhesion recognition sequence
LYGYAT

SEQ ID NO: 4155 - protein, 7 aa, Artificial Sequence
  Representative linear modulating agent based on Desmocollin-1 cell adhesion recognition sequence
LYGYATT

SEQ ID NO: 4156 - protein, 8 aa, Artificial Sequence
  Representative linear modulating agent based on Desmocollin-1 cell adhesion recognition sequence
LYGYATTA

SEQ ID NO: 4157 - protein, 9 aa, Artificial Sequence
  Representative linear modulating agent based on Desmocollin-1 cell adhesion recognition sequence
LYGYATTAD

SEQ ID NO: 4158 - protein, 10 aa, Artificial Sequence
  Representative linear modulating agent based on Desmocollin-1 cell adhesion recognition sequence
LYGYATTADG

SEQ ID NO: 4159 - protein, 6 aa, Artificial Sequence
  Representative linear modulating agent based on Desmocollin-1 cell adhesion recognition sequence
LYAYAT

SEQ ID NO: 4160 - protein, 7 aa, Artificial Sequence
  Representative linear modulating agent based on Desmocollin-1 cell adhesion recognition sequence
LYAYATT

SEQ ID NO: 4161 - protein, 8 aa, Artificial Sequence
  Representative linear modulating agent based on Desmocollin-1 cell adhesion recognition sequence
LYAYATTA

SEQ ID NO: 4162 - protein, 9 aa, Artificial Sequence
  Representative linear modulating agent based on Desmocollin-1 cell adhesion recognition sequence
LYAYATTAD

SEQ ID NO: 4163 - protein, 10 aa, Artificial Sequence
  Representative linear modulating agent based on Desmocollin-1 cell adhesion recognition sequence
LYAYATTADG

SEQ ID NO: 4164 - protein, 6 aa, Artificial Sequence
  Representative linear modulating agent based on Desmocollin-1 cell adhesion recognition sequence
VYGYAT

SEQ ID NO: 4165 - protein, 7 aa, Artificial Sequence
  Representative linear modulating agent based on Desmocollin-1 cell adhesion recognition sequence
VYGYATT

SEQ ID NO: 4166 - protein, 8 aa, Artificial Sequence
  Representative linear modulating agent based on Desmocollin-1 cell adhesion recognition sequence
VYGYATTA

SEQ ID NO: 4167 - protein, 9 aa, Artificial Sequence
  Representative linear modulating agent based on Desmocollin-1 cell adhesion recognition sequence
VYGYATTAD

SEQ ID NO: 4168 - protein, 10 aa, Artificial Sequence
  Representative linear modulating agent based on Desmocollin-1 cell adhesion recognition sequence
VYGYATTADG

SEQ ID NO: 4169 - protein, 6 aa, Artificial Sequence
  Representative linear modulating agent based on Desmocollin-1 cell adhesion recognition sequence
VYAYAT

SEQ ID NO: 4170 - protein, 7 aa, Artificial Sequence
  Representative linear modulating agent based on Desmocollin-1 cell adhesion recognition sequence
VYAYATT

SEQ ID NO: 4171 - protein, 8 aa, Artificial Sequence
  Representative linear modulating agent based on Desmocollin-1 cell adhesion recognition sequence
VYAYATTA

SEQ ID NO: 4172 - protein, 9 aa, Artificial Sequence
  Representative linear modulating agent based on Desmocollin-1 cell adhesion recognition sequence
VYAYATTAD

SEQ ID NO: 4173 - protein, 10 aa, Artificial Sequence
  Representative linear modulating agent based on Desmocollin-1 cell adhesion recognition sequence
VYAYATTADG

SEQ ID NO: 4174 - protein, 6 aa, Artificial Sequence
  Representative linear modulating agent based on Desmocollin-1 cell adhesion recognition sequence
IYGYAT

SEQ ID NO: 4175 - protein, 7 aa, Artificial Sequence
  Representative linear modulating agent based on Desmocollin-1 cell adhesion recognition sequence
IYGYATT

SEQ ID NO: 4176 - protein, 8 aa, Artificial Sequence
  Representative linear modulating agent based on Desmocollin-1 cell adhesion recognition sequence
IYGYATTA

SEQ ID NO: 4177 - protein, 9 aa, Artificial Sequence
  Representative linear modulating agent based on Desmocollin-1 cell adhesion recognition sequence
IYGYATTAD

SEQ ID NO: 4178 - protein, 10 aa, Artificial Sequence
  Representative linear modulating agent based on Desmocollin-1 cell adhesion recognition sequence
IYGYATTADG

SEQ ID NO: 4179 - protein, 6 aa, Artificial Sequence
  Representative linear modulating agent based on Desmocollin-1 cell adhesion recognition sequence
IYAYAT

SEQ ID NO: 4180 - protein, 7 aa, Artificial Sequence
  Representative linear modulating agent based on Desmocollin-1 cell adhesion recognition sequence
IYAYATT

SEQ ID NO: 4181 - protein, 8 aa, Artificial Sequence
  Representative linear modulating agent based on Desmocollin-1 cell adhesion recognition sequence
IYAYATTA

SEQ ID NO: 4182 - protein, 9 aa, Artificial Sequence
  Representative linear modulating agent based on Desmocollin-1 cell adhesion recognition sequence
IYAYATTAD

SEQ ID NO: 4183 - protein, 10 aa, Artificial Sequence
  Representative linear modulating agent based on Desmocollin-1 cell adhesion recognition sequence
IYAYATTADG

SEQ ID NO: 4184 - protein, 10 aa, Artificial Sequence
  Representative linear modulating agent based on Desmocollin-1 cell adhesion recognition sequence
LYGYATTADG

SEQ ID NO: 4185 - protein, 10 aa, Artificial Sequence
  Representative linear modulating agent based on Desmocollin-1 cell adhesion recognition sequence
LYAYATTADG

SEQ ID NO: 4186 - protein, 10 aa, Artificial Sequence
  Representative linear modulating agent based on Desmocollin-1 cell adhesion recognition sequence
VYGYATTADG

SEQ ID NO: 4187 - protein, 10 aa, Artificial Sequence
  Representative linear modulating agent based on Desmocollin-1 cell adhesion recognition sequence
VYAYATTADG

SEQ ID NO: 4188 - protein, 10 aa, Artificial Sequence
  Representative linear modulating agent based on Desmocollin-1 cell adhesion recognition sequence
IYGYATTADG

SEQ ID NO: 4189 - protein, 10 aa, Artificial Sequence
  Representative linear modulating agent based on Desmocollin-1 cell adhesion recognition sequence
IYAYATTADG

SEQ ID NO: 4190 - protein, 4 aa, Artificial Sequence
  Representative linear modulating agent based on Desmocollin-2 cell adhesion recognition sequence
FATT

SEQ ID NO: 4191 - protein, 5 aa, Artificial Sequence
  Representative linear modulating agent based on Desmocollin-2 cell adhesion recognition sequence
FATTP

SEQ ID NO: 4192 - protein, 6 aa, Artificial Sequence
  Representative linear modulating agent based on Desmocollin-2 cell adhesion recognition sequence
FATTPD

SEQ ID NO: 4193 - protein, 7 aa, Artificial Sequence
  Representative linear modulating agent based on Desmocollin-2 cell adhesion recognition sequence
FATTPDG

SEQ ID NO: 4194 - protein, 4 aa, Artificial Sequence
  Representative linear modulating agent based on Desmocollin-2 cell adhesion recognition sequence
AFAT

SEQ ID NO: 4195 - protein, 5 aa, Artificial Sequence
  Representative linear modulating agent based on Desmocollin-2 cell adhesion recognition sequence
AFATT

SEQ ID NO: 4196 - protein, 6 aa, Artificial Sequence
  Representative linear modulating agent based on Desmocollin-2 cell adhesion recognition sequence
AFATTP

SEQ ID NO: 4197 - protein, 7 aa, Artificial Sequence
  Representative linear modulating agent based on Desmocollin-2 cell adhesion recognition sequence
AFATTPD

SEQ ID NO: 4198 - protein, 8 aa, Artificial Sequence
  Representative linear modulating agent based on Desmocollin-2 cell adhesion recognition sequence
AFATTPDG

SEQ ID NO: 4199 - protein, 5 aa, Artificial Sequence
  Representative linear modulating agent based on Desmocollin-2 cell adhesion recognition sequence
IAFAT

SEQ ID NO: 4200 - protein, 6 aa, Artificial Sequence
  Representative linear modulating agent based on Desmocollin-2 cell adhesion recognition sequence
IAFATT

SEQ ID NO: 4201 - protein, 7 aa, Artificial Sequence
  Representative linear modulating agent based on Desmocollin-2 cell adhesion recognition sequence
IAFATTP

SEQ ID NO: 4202 - protein, 8 aa, Artificial Sequence
  Representative linear modulating agent based on Desmocollin-2 cell adhesion recognition sequence
IAFATTPD

SEQ ID NO: 4203 - protein, 9 aa, Artificial Sequence
  Representative linear modulating agent based on Desmocollin-2 cell adhesion recognition sequence
IAFATTPDG

SEQ ID NO: 4204 - protein, 6 aa, Artificial Sequence
  Representative linear modulating agent based on Desmocollin-2 cell adhesion recognition sequence
IIAFAT

SEQ ID NO: 4205 - protein, 7 aa, Artificial Sequence
  Representative linear modulating agent based on Desmocollin-2 cell adhesion recognition sequence
IIAFATT

SEQ ID NO: 4206 - protein, 8 aa, Artificial Sequence
  Representative linear modulating agent based on Desmocollin-2 cell adhesion recognition sequence
IIAFATTP

SEQ ID NO: 4207 - protein, 9 aa, Artificial Sequence
  Representative linear modulating agent based on Desmocollin-2 cell adhesion recognition sequence
IIAFATTPD

SEQ ID NO: 4208 - protein, 10 aa, Artificial Sequence
  Representative linear modulating agent based on Desmocollin-2 cell adhesion recognition sequence
IIAFATTPDG

SEQ ID NO: 4209 - protein, 6 aa, Artificial Sequence
  Representative linear modulating agent based on Desmocollin-2 cell adhesion recognition sequence
LIAFAT

SEQ ID NO: 4210 - protein, 7 aa, Artificial Sequence
  Representative linear modulating agent based on Desmocollin-2 cell adhesion recognition sequence
LIAFATT

SEQ ID NO: 4211 - protein, 8 aa, Artificial Sequence
  Representative linear modulating agent based on Desmocollin-2 cell adhesion recognition sequence
LIAFATTP

SEQ ID NO: 4212 - protein, 9 aa, Artificial Sequence
  Representative linear modulating agent based on Desmocollin-2 cell adhesion recognition sequence
LIAFATTPD

SEQ ID NO: 4213 - protein, 10 aa, Artificial Sequence
  Representative linear modulating agent based on Desmocollin-2 cell adhesion recognition sequence
LIAFATTPDG

SEQ ID NO: 4214 - protein, 10 aa, Artificial Sequence
  Representative linear modulating agent based on Desmocollin-2 cell adhesion recognition sequence
IIAFATTPDG

SEQ ID NO: 4215 - protein, 10 aa, Artificial Sequence
  Representative linear modulating agent based on Desmocollin-2 cell adhesion recognition sequence
LIAFATTPDG

SEQ ID NO: 4216 - protein, 4 aa, Artificial Sequence
  Representative linear modulating agent based on Desmocollin-3 or Desmocollin-4 cell adhesion recognition sequence
YAST

SEQ ID NO: 4217 - protein, 5 aa, Artificial Sequence
  Representative linear modulating agent based on Desmocollin-3 or Desmocollin-4 cell adhesion recognition sequence
YASTA

SEQ ID NO: 4218 - protein, 6 aa, Artificial Sequence
  Representative linear modulating agent based on Desmocollin-3 or Desmocollin-4 cell adhesion recognition sequence
YASTAD

SEQ ID NO: 4219 - protein, 7 aa, Artificial Sequence
  Representative linear modulating agent based on Desmocollin-3 or Desmocollin-4 cell adhesion recognition sequence
YASTADG

SEQ ID NO: 4220 - protein, 4 aa, Artificial Sequence
  Representative linear modulating agent based on Desmocollin-3 or Desmocollin-4 cell adhesion recognition sequence
AYAS

SEQ ID NO: 4221 - protein, 5 aa, Artificial Sequence
  Representative linear modulating agent based on Desmocollin-3 or Desmocollin-4 cell adhesion recognition sequence
AYAST

SEQ ID NO: 4222 - protein, 6 aa, Artificial Sequence
  Representative linear modulating agent based on Desmocollin-3 or Desmocollin-4 cell adhesion recognition sequence
AYASTA

SEQ ID NO: 4223 - protein, 7 aa, Artificial Sequence
  Representative linear modulating agent based on Desmocollin-3 or Desmocollin-4 cell adhesion recognition sequence
AYASTAD

SEQ ID NO: 4224 - protein, 8 aa, Artificial Sequence
  Representative linear modulating agent based on Desmocollin-3 or Desmocollin-4 cell adhesion recognition sequence
AYASTADG

SEQ ID NO: 4225 - protein, 5 aa, Artificial Sequence
  Representative linear modulating agent based on Desmocollin-3 or Desmocollin-4 cell adhesion recognition sequence
IAYAS

SEQ ID NO: 4226 - protein, 6 aa, Artificial Sequence
  Representative linear modulating agent based on Desmocollin-3 or Desmocollin-4 cell adhesion recognition sequence
IAYAST

SEQ ID NO: 4227 - protein, 7 aa, Artificial Sequence
  Representative linear modulating agent based on Desmocollin-3 or Desmocollin-4 cell adhesion recognition sequence
IAYASTA

SEQ ID NO: 4228 - protein, 8 aa, Artificial Sequence
  Representative linear modulating agent based on Desmocollin-3 or Desmocollin-4 cell adhesion recognition sequence
IAYASTAD

SEQ ID NO: 4229 - protein, 9 aa, Artificial Sequence
  Representative linear modulating agent based on Desmocollin-3 or Desmocollin-4 cell adhesion recognition sequence
IAYASTADG

SEQ ID NO: 4230 - protein, 6 aa, Artificial Sequence
  Representative linear modulating agent based on Desmocollin-3 or Desmocollin-4 cell adhesion recognition sequence
LIAYAS

SEQ ID NO: 4231 - protein, 7 aa, Artificial Sequence
  Representative linear modulating agent based on Desmocollin-3 or Desmocollin-4 cell adhesion recognition sequence
LIAYAST

SEQ ID NO: 4232 - protein, 8 aa, Artificial Sequence
  Representative linear modulating agent based on Desmocollin-3 or Desmocollin-4 cell adhesion recognition sequence
LIAYASTA

SEQ ID NO: 4233 - protein, 9 aa, Artificial Sequence
  Representative linear modulating agent based on Desmocollin-3 or Desmocollin-4 cell adhesion recognition sequence
LIAYASTAD

SEQ ID NO: 4234 - protein, 10 aa, Artificial Sequence
  Representative linear modulating agent based on Desmocollin-3 or Desmocollin-4 cell adhesion recognition sequence
LIAYASTADG

SEQ ID NO: 4235 - protein, 10 aa, Artificial Sequence
  Representative linear modulating agent based on Desmocollin-3 or Desmocollin-4 cell adhesion recognition sequence
LIAYASTADG

SEQ ID NO: 4236 - protein, 5 aa, Artificial Sequence
  Representative cyclic modulating agent based on Desmoglein-1 cell adhesion recognition sequence
CRALC

SEQ ID NO: 4237 - protein, 6 aa, Artificial Sequence
  Representative cyclic modulating agent based on Desmoglein-1 cell adhesion recognition sequence
CRALNC

SEQ ID NO: 4238 - protein, 7 aa, Artificial Sequence
  Representative cyclic modulating agent based on Desmoglein-1 cell adhesion recognition sequence
CRALNSC

SEQ ID NO: 4239 - protein, 8 aa, Artificial Sequence
  Representative cyclic modulating agent based on Desmoglein-1 cell adhesion recognition sequence
CRALNSMC

SEQ ID NO: 4240 - protein, 8 aa, Artificial Sequence
  Representative cyclic modulating agent based on Desmoglein-1 cell adhesion recognition sequence
CRALNSLC

SEQ ID NO: 4241 - protein, 9 aa, Artificial Sequence
  Representative cyclic modulating agent based on Desmoglein-1 cell adhesion recognition sequence
CRALNSMGC

SEQ ID NO: 4242 - protein, 9 aa, Artificial Sequence
  Representative cyclic modulating agent based on Desmoglein-1 cell adhesion recognition sequence
CRALNSLGC

SEQ ID NO: 4243 - protein, 6 aa, Artificial Sequence
  Representative cyclic modulating agent based on Desmoglein-1 cell adhesion recognition sequence
CCRALC

SEQ ID NO: 4244 - protein, 7 aa, Artificial Sequence
  Representative cyclic modulating agent based on Desmoglein-1 cell adhesion recognition sequence
CCRALNC

SEQ ID NO: 4245 - protein, 8 aa, Artificial Sequence
  Representative cyclic modulating agent based on Desmoglein-1 cell adhesion recognition sequence
CCRALNSC

SEQ ID NO: 4246 - protein, 9 aa, Artificial Sequence
  Representative cyclic modulating agent based on Desmoglein-1 cell adhesion recognition sequence
CCRALNSMC

SEQ ID NO: 4247 - protein, 9 aa, Artificial Sequence
  Representative cyclic modulating agent based on Desmoglein-1 cell adhesion recognition sequence
CCRALNSLC

SEQ ID NO: 4248 - protein, 10 aa, Artificial Sequence
  Representative cyclic modulating agent based on Desmoglein-1 cell adhesion recognition sequence
CCRALNSMGC

SEQ ID NO: 4249 - protein, 10 aa, Artificial Sequence
  Representative cyclic modulating agent based on Desmoglein-1 cell adhesion recognition sequence
CCRALNSLGC

SEQ ID NO: 4250 - protein, 7 aa, Artificial Sequence
  Representative cyclic modulating agent based on Desmoglein-1 cell adhesion recognition sequence
CYCRALC

SEQ ID NO: 4251 - protein, 8 aa, Artificial Sequence
  Representative cyclic modulating agent based on Desmoglein-1 cell adhesion recognition sequence
CYCRALNC

SEQ ID NO: 4252 - protein, 9 aa, Artificial Sequence
  Representative cyclic modulating agent based on Desmoglein-1 cell adhesion recognition sequence
CYCRALNSC

SEQ ID NO: 4253 - protein, 10 aa, Artificial Sequence
  Representative cyclic modulating agent based on Desmoglein-1 cell adhesion recognition sequence
CYCRALNSMC

SEQ ID NO: 4254 - protein, 10 aa, Artificial Sequence
  Representative cyclic modulating agent based on Desmoglein-1 cell adhesion recognition sequence
CYCRALNSLC

SEQ ID NO: 4255 - protein, 11 aa, Artificial Sequence
  Representative cyclic modulating agent based on Desmoglein-1 cell adhesion recognition sequence
CYCRALNSMGC

SEQ ID NO: 4256 - protein, 11 aa, Artificial Sequence
  Representative cyclic modulating agent based on Desmoglein-1 cell adhesion recognition sequence
CYCRALNSLGC

SEQ ID NO: 4257 - protein, 7 aa, Artificial Sequence
  Representative cyclic modulating agent based on Desmoglein-1 cell adhesion recognition sequence
CIYRALC

SEQ ID NO: 4258 - protein, 8 aa, Artificial Sequence
  Representative cyclic modulating agent based on Desmoglein-1 cell adhesion recognition sequence
CIYRALNC

SEQ ID NO: 4259 - protein, 9 aa, Artificial Sequence
  Representative cyclic modulating agent based on Desmoglein-1 cell adhesion recognition sequence
CIYRALNSC

SEQ ID NO: 4260 - protein, 10 aa, Artificial Sequence
  Representative cyclic modulating agent based on Desmoglein-1 cell adhesion recognition sequence
CIYRALNSMC

SEQ ID NO: 4261 - protein, 10 aa, Artificial Sequence
  Representative cyclic modulating agent based on Desmoglein-1 cell adhesion recognition sequence
CIYRALNSLC

SEQ ID NO: 4262 - protein, 11 aa, Artificial Sequence
  Representative cyclic modulating agent based on Desmoglein-1 cell adhesion recognition sequence
CIYRALNSMGC

SEQ ID NO: 4263 - protein, 11 aa, Artificial Sequence
  Representative cyclic modulating agent based on Desmoglein-1 cell adhesion recognition sequence
CIYRALNSLGC

SEQ ID NO: 4264 - protein, 5 aa, Artificial Sequence
  Representative cyclic modulating agent based on Desmoglein-1 cell adhesion recognition sequence
ERALK

SEQ ID NO: 4265 - protein, 6 aa, Artificial Sequence
  Representative cyclic modulating agent based on Desmoglein-1 cell adhesion recognition sequence
ERALNK

SEQ ID NO: 4266 - protein, 7 aa, Artificial Sequence
  Representative cyclic modulating agent based on Desmoglein-1 cell adhesion recognition sequence
ERALNSK

SEQ ID NO: 4267 - protein, 8 aa, Artificial Sequence
  Representative cyclic modulating agent based on Desmoglein-1 cell adhesion recognition sequence
ERALNSMK

SEQ ID NO: 4268 - protein, 8 aa, Artificial Sequence
  Representative cyclic modulating agent based on Desmoglein-1 cell adhesion recognition sequence
ERALNSLK

SEQ ID NO: 4269 - protein, 9 aa, Artificial Sequence
  Representative cyclic modulating agent based on Desmoglein-1 cell adhesion recognition sequence
ERALNSMGK

SEQ ID NO: 4270 - protein, 9 aa, Artificial Sequence
  Representative cyclic modulating agent based on Desmoglein-1 cell adhesion recognition sequence
ERALNSLGK

SEQ ID NO: 4271 - protein, 6 aa, Artificial Sequence
  Representative cyclic modulating agent based on Desmoglein-1 cell adhesion recognition sequence
ECRALK

SEQ ID NO: 4272 - protein, 7 aa, Artificial Sequence
  Representative cyclic modulating agent based on Desmoglein-1 cell adhesion recognition sequence
ECRALNK

SEQ ID NO: 4273 - protein, 8 aa, Artificial Sequence
  Representative cyclic modulating agent based on Desmoglein-1 cell adhesion recognition sequence
ECRALNSK

SEQ ID NO: 4274 - protein, 9 aa, Artificial Sequence
  Representative cyclic modulating agent based on Desmoglein-1 cell adhesion recognition sequence
ECRALNSMK

SEQ ID NO: 4275 - protein, 9 aa, Artificial Sequence
  Representative cyclic modulating agent based on Desmoglein-1 cell adhesion recognition sequence
ECRALNSLK

SEQ ID NO: 4276 - protein, 10 aa, Artificial Sequence
  Representative cyclic modulating agent based on Desmoglein-1 cell adhesion recognition sequence
ECRALNSMGK

SEQ ID NO: 4277 - protein, 10 aa, Artificial Sequence
  Representative cyclic modulating agent based on Desmoglein-1 cell adhesion recognition sequence
ECRALNSLGK

SEQ ID NO: 4278 - protein, 7 aa, Artificial Sequence
  Representative cyclic modulating agent based on Desmoglein-1 cell adhesion recognition sequence
EYCRALK

SEQ ID NO: 4279 - protein, 8 aa, Artificial Sequence
  Representative cyclic modulating agent based on Desmoglein-1 cell adhesion recognition sequence
EYCRALNK

SEQ ID NO: 4280 - protein, 9 aa, Artificial Sequence
  Representative cyclic modulating agent based on Desmoglein-1 cell adhesion recognition sequence
EYCRALNSK

SEQ ID NO: 4281 - protein, 10 aa, Artificial Sequence
  Representative cyclic modulating agent based on Desmoglein-1 cell adhesion recognition sequence
EYCRALNSMK

SEQ ID NO: 4282 - protein, 10 aa, Artificial Sequence
  Representative cyclic modulating agent based on Desmoglein-1 cell adhesion recognition sequence
EYCRALNSLK

SEQ ID NO: 4283 - protein, 11 aa, Artificial Sequence
  Representative cyclic modulating agent based on Desmoglein-1 cell adhesion recognition sequence
EYCRALNSMGK

SEQ ID NO: 4284 - protein, 11 aa, Artificial Sequence
  Representative cyclic modulating agent based on Desmoglein-1 cell adhesion recognition sequence
EYCRALNSLGK

SEQ ID NO: 4285 - protein, 7 aa, Artificial Sequence
  Representative cyclic modulating agent based on Desmoglein-1 cell adhesion recognition sequence
EIYRALK

SEQ ID NO: 4286 - protein, 8 aa, Artificial Sequence
  Representative cyclic modulating agent based on Desmoglein-1 cell adhesion recognition sequence
EIYRALNK

SEQ ID NO: 4287 - protein, 9 aa, Artificial Sequence
  Representative cyclic modulating agent based on Desmoglein-1 cell adhesion recognition sequence
EIYRALNSK

SEQ ID NO: 4288 - protein, 10 aa, Artificial Sequence
  Representative cyclic modulating agent based on Desmoglein-1 cell adhesion recognition sequence
EIYRALNSMK

SEQ ID NO: 4289 - protein, 10 aa, Artificial Sequence
  Representative cyclic modulating agent based on Desmoglein-1 cell adhesion recognition sequence
EIYRALNSLK

SEQ ID NO: 4290 - protein, 11 aa, Artificial Sequence
  Representative cyclic modulating agent based on Desmoglein-1 cell adhesion recognition sequence
EIYRALNSMGK

SEQ ID NO: 4291 - protein, 11 aa, Artificial Sequence
  Representative cyclic modulating agent based on Desmoglein-1 cell adhesion recognition sequence
EIYRALNSLGK

SEQ ID NO: 4292 - protein, 5 aa, Artificial Sequence
  Representative cyclic modulating agent based on Desmoglein-1 cell adhesion recognition sequence
KRALE

SEQ ID NO: 4293 - protein, 6 aa, Artificial Sequence
  Representative cyclic modulating agent based on Desmoglein-1 cell adhesion recognition sequence
KRALNE

SEQ ID NO: 4294 - protein, 7 aa, Artificial Sequence
  Representative cyclic modulating agent based on Desmoglein-1 cell adhesion recognition sequence
KRALNSE

SEQ ID NO: 4295 - protein, 8 aa, Artificial Sequence
  Representative cyclic modulating agent based on Desmoglein-1 cell adhesion recognition sequence
KRALNSME

SEQ ID NO: 4296 - protein, 8 aa, Artificial Sequence
  Representative cyclic modulating agent based on Desmoglein-1 cell adhesion recognition sequence
KRALNSLE

SEQ ID NO: 4297 - protein, 9 aa, Artificial Sequence
  Representative cyclic modulating agent based on Desmoglein-1 cell adhesion recognition sequence
KRALNSMGE

SEQ ID NO: 4298 - protein, 9 aa, Artificial Sequence
  Representative cyclic modulating agent based on Desmoglein-1 cell adhesion recognition sequence
KRALNSLGE

SEQ ID NO: 4299 - protein, 6 aa, Artificial Sequence
  Representative cyclic modulating agent based on Desmoglein-1 cell adhesion recognition sequence
KCRALE

SEQ ID NO: 4300 - protein, 7 aa, Artificial Sequence
  Representative cyclic modulating agent based on Desmoglein-1 cell adhesion recognition sequence
KCRALNE

SEQ ID NO: 4301 - protein, 8 aa, Artificial Sequence
  Representative cyclic modulating agent based on Desmoglein-1 cell adhesion recognition sequence
KCRALNSE

SEQ ID NO: 4302 - protein, 9 aa, Artificial Sequence
  Representative cyclic modulating agent based on Desmoglein-1 cell adhesion recognition sequence
KCRALNSME

SEQ ID NO: 4303 - protein, 9 aa, Artificial Sequence
  Representative cyclic modulating agent based on Desmoglein-1 cell adhesion recognition sequence
KCRALNSLE

SEQ ID NO: 4304 - protein, 10 aa, Artificial Sequence
  Representative cyclic modulating agent based on Desmoglein-1 cell adhesion recognition sequence
KCRALNSMGE

SEQ ID NO: 4305 - protein, 10 aa, Artificial Sequence
  Representative cyclic modulating agent based on Desmoglein-1 cell adhesion recognition sequence
KCRALNSLGE

SEQ ID NO: 4306 - protein, 7 aa, Artificial Sequence
  Representative cyclic modulating agent based on Desmoglein-1 cell adhesion recognition sequence
KYCRALE

SEQ ID NO: 4307 - protein, 8 aa, Artificial Sequence
  Representative cyclic modulating agent based on Desmoglein-1 cell adhesion recognition sequence
KYCRALNE

SEQ ID NO: 4308 - protein, 9 aa, Artificial Sequence
  Representative cyclic modulating agent based on Desmoglein-1 cell adhesion recognition sequence
KYCRALNSE

SEQ ID NO: 4309 - protein, 10 aa, Artificial Sequence
  Representative cyclic modulating agent based on Desmoglein-1 cell adhesion recognition sequence
KYCRALNSME

SEQ ID NO: 4310 - protein, 10 aa, Artificial Sequence
  Representative cyclic modulating agent based on Desmoglein-1 cell adhesion recognition sequence
KYCRALNSLE

SEQ ID NO: 4311 - protein, 11 aa, Artificial Sequence
  Representative cyclic modulating agent based on Desmoglein-1 cell adhesion recognition sequence
KYCRALNSMGE

SEQ ID NO: 4312 - protein, 11 aa, Artificial Sequence
  Representative cyclic modulating agent based on Desmoglein-1 cell adhesion recognition sequence
KYCRALNSLGE

SEQ ID NO: 4313 - protein, 7 aa, Artificial Sequence
  Representative cyclic modulating agent based on Desmoglein-1 cell adhesion recognition sequence
KIYRALE

SEQ ID NO: 4314 - protein, 8 aa, Artificial Sequence
  Representative cyclic modulating agent based on Desmoglein-1 cell adhesion recognition sequence
KIYRALNE

SEQ ID NO: 4315 - protein, 9 aa, Artificial Sequence
  Representative cyclic modulating agent based on Desmoglein-1 cell adhesion recognition sequence
KIYRALNSE

SEQ ID NO: 4316 - protein, 10 aa, Artificial Sequence
  Representative cyclic modulating agent based on Desmoglein-1 cell adhesion recognition sequence
KIYRALNSME

SEQ ID NO: 4317 - protein, 10 aa, Artificial Sequence
  Representative cyclic modulating agent based on Desmoglein-1 cell adhesion recognition sequence
KIYRALNSLE

SEQ ID NO: 4318 - protein, 11 aa, Artificial Sequence
  Representative cyclic modulating agent based on Desmoglein-1 cell adhesion recognition sequence
KIYRALNSMGE

SEQ ID NO: 4319 - protein, 11 aa, Artificial Sequence
  Representative cyclic modulating agent based on Desmoglein-1 cell adhesion recognition sequence
KIYRALNSLGE

SEQ ID NO: 4320 - protein, 5 aa, Artificial Sequence
  Representative cyclic modulating agent based on Desmoglein-1 cell adhesion recognition sequence
DRALK

SEQ ID NO: 4321 - protein, 6 aa, Artificial Sequence
  Representative cyclic modulating agent based on Desmoglein-1 cell adhesion recognition sequence
DRALNK

SEQ ID NO: 4322 - protein, 7 aa, Artificial Sequence
  Representative cyclic modulating agent based on Desmoglein-1 cell adhesion recognition sequence
DRALNSK

SEQ ID NO: 4323 - protein, 8 aa, Artificial Sequence
  Representative cyclic modulating agent based on Desmoglein-1 cell adhesion recognition sequence
DRALNSMK

SEQ ID NO: 4324 - protein, 8 aa, Artificial Sequence
  Representative cyclic modulating agent based on Desmoglein-1 cell adhesion recognition sequence
DRALNSLK

SEQ ID NO: 4325 - protein, 9 aa, Artificial Sequence
  Representative cyclic modulating agent based on Desmoglein-1 cell adhesion recognition sequence
DRALNSMGK

SEQ ID NO: 4326 - protein, 9 aa, Artificial Sequence
  Representative cyclic modulating agent based on Desmoglein-1 cell adhesion recognition sequence
DRALNSLGK

SEQ ID NO: 4327 - protein, 6 aa, Artificial Sequence
  Representative cyclic modulating agent based on Desmoglein-1 cell adhesion recognition sequence
DCRALK

SEQ ID NO: 4328 - protein, 7 aa, Artificial Sequence
  Representative cyclic modulating agent based on Desmoglein-1 cell adhesion recognition sequence
DCRALNK

SEQ ID NO: 4329 - protein, 8 aa, Artificial Sequence
  Representative cyclic modulating agent based on Desmoglein-1 cell adhesion recognition sequence
DCRALNSK

SEQ ID NO: 4330 - protein, 9 aa, Artificial Sequence
  Representative cyclic modulating agent based on Desmoglein-1 cell adhesion recognition sequence
DCRALNSMK

SEQ ID NO: 4331 - protein, 9 aa, Artificial Sequence
  Representative cyclic modulating agent based on Desmoglein-1 cell adhesion recognition sequence
DCRALNSLK

SEQ ID NO: 4332 - protein, 10 aa, Artificial Sequence
  Representative cyclic modulating agent based on Desmoglein-1 cell adhesion recognition sequence
DCRALNSMGK

SEQ ID NO: 4333 - protein, 10 aa, Artificial Sequence
  Representative cyclic modulating agent based on Desmoglein-1 cell adhesion recognition sequence
DCRALNSLGK

SEQ ID NO: 4334 - protein, 7 aa, Artificial Sequence
  Representative cyclic modulating agent based on Desmoglein-1 cell adhesion recognition sequence
DYCRALK

SEQ ID NO: 4335 - protein, 8 aa, Artificial Sequence
  Representative cyclic modulating agent based on Desmoglein-1 cell adhesion recognition sequence
DYCRALNK

SEQ ID NO: 4336 - protein, 9 aa, Artificial Sequence
  Representative cyclic modulating agent based on Desmoglein-1 cell adhesion recognition sequence
DYCRALNSK

SEQ ID NO: 4337 - protein, 10 aa, Artificial Sequence
  Representative cyclic modulating agent based on Desmoglein-1 cell adhesion recognition sequence
DYCRALNSMK

SEQ ID NO: 4338 - protein, 10 aa, Artificial Sequence
  Representative cyclic modulating agent based on Desmoglein-1 cell adhesion recognition sequence
DYCRALNSLK

SEQ ID NO: 4339 - protein, 11 aa, Artificial Sequence
  Representative cyclic modulating agent based on Desmoglein-1 cell adhesion recognition sequence
DYCRALNSMGK

SEQ ID NO: 4340 - protein, 11 aa, Artificial Sequence
  Representative cyclic modulating agent based on Desmoglein-1 cell adhesion recognition sequence
DYCRALNSLGK

SEQ ID NO: 4341 - protein, 7 aa, Artificial Sequence
  Representative cyclic modulating agent based on Desmoglein-1 cell adhesion recognition sequence
DIYRALK

SEQ ID NO: 4342 - protein, 8 aa, Artificial Sequence
  Representative cyclic modulating agent based on Desmoglein-1 cell adhesion recognition sequence
DIYRALNK

SEQ ID NO: 4343 - protein, 9 aa, Artificial Sequence
  Representative cyclic modulating agent based on Desmoglein-1 cell adhesion recognition sequence
DIYRALNSK

SEQ ID NO: 4344 - protein, 10 aa, Artificial Sequence
  Representative cyclic modulating agent based on Desmoglein-1 cell adhesion recognition sequence
DIYRALNSMK

SEQ ID NO: 4345 - protein, 10 aa, Artificial Sequence
  Representative cyclic modulating agent based on Desmoglein-1 cell adhesion recognition sequence
DIYRALNSLK

SEQ ID NO: 4346 - protein, 11 aa, Artificial Sequence
  Representative cyclic modulating agent based on Desmoglein-1 cell adhesion recognition sequence
DIYRALNSMGK

SEQ ID NO: 4347 - protein, 11 aa, Artificial Sequence
  Representative cyclic modulating agent based on Desmoglein-1 cell adhesion recognition sequence
DIYRALNSLGK

SEQ ID NO: 4348 - protein, 5 aa, Artificial Sequence
  Representative cyclic modulating agent based on Desmoglein-1 cell adhesion recognition sequence
KRALD

SEQ ID NO: 4349 - protein, 6 aa, Artificial Sequence
  Representative cyclic modulating agent based on Desmoglein-1 cell adhesion recognition sequence
KRALND

SEQ ID NO: 4350 - protein, 7 aa, Artificial Sequence
  Representative cyclic modulating agent based on Desmoglein-1 cell adhesion recognition sequence
KRALNSD

SEQ ID NO: 4351 - protein, 8 aa, Artificial Sequence
  Representative cyclic modulating agent based on Desmoglein-1 cell adhesion recognition sequence
KRALNSMD

SEQ ID NO: 4352 - protein, 8 aa, Artificial Sequence
  Representative cyclic modulating agent based on Desmoglein-1 cell adhesion recognition sequence
KRALNSLD

SEQ ID NO: 4353 - protein, 9 aa, Artificial Sequence
  Representative cyclic modulating agent based on Desmoglein-1 cell adhesion recognition sequence
KRALNSMGD

SEQ ID NO: 4354 - protein, 9 aa, Artificial Sequence
  Representative cyclic modulating agent based on Desmoglein-1 cell adhesion recognition sequence
KRALNSLGD

SEQ ID NO: 4355 - protein, 6 aa, Artificial Sequence
  Representative cyclic modulating agent based on Desmoglein-1 cell adhesion recognition sequence
KCRALD

SEQ ID NO: 4356 - protein, 7 aa, Artificial Sequence
  Representative cyclic modulating agent based on Desmoglein-1 cell adhesion recognition sequence
KCRALND

SEQ ID NO: 4357 - protein, 8 aa, Artificial Sequence
  Representative cyclic modulating agent based on Desmoglein-1 cell adhesion recognition sequence
KCRALNSD

SEQ ID NO: 4358 - protein, 9 aa, Artificial Sequence
  Representative cyclic modulating agent based on Desmoglein-1 cell adhesion recognition sequence
KCRALNSMD

SEQ ID NO: 4359 - protein, 9 aa, Artificial Sequence
  Representative cyclic modulating agent based on Desmoglein-1 cell adhesion recognition sequence
KCRALNSLD

SEQ ID NO: 4360 - protein, 10 aa, Artificial Sequence
  Representative cyclic modulating agent based on Desmoglein-1 cell adhesion recognition sequence
KCRALNSMGD

SEQ ID NO: 4361 - protein, 10 aa, Artificial Sequence
  Representative cyclic modulating agent based on Desmoglein-1 cell adhesion recognition sequence
KCRALNSLGD

SEQ ID NO: 4362 - protein, 7 aa, Artificial Sequence
  Representative cyclic modulating agent based on Desmoglein-1 cell adhesion recognition sequence
KYCRALD

SEQ ID NO: 4363 - protein, 8 aa, Artificial Sequence
  Representative cyclic modulating agent based on Desmoglein-1 cell adhesion recognition sequence
KYCRALND

SEQ ID NO: 4364 - protein, 9 aa, Artificial Sequence
  Representative cyclic modulating agent based on Desmoglein-1 cell adhesion recognition sequence
KYCRALNSD

SEQ ID NO: 4365 - protein, 10 aa, Artificial Sequence
  Representative cyclic modulating agent based on Desmoglein-1 cell adhesion recognition sequence
KYCRALNSMD

SEQ ID NO: 4366 - protein, 10 aa, Artificial Sequence
  Representative cyclic modulating agent based on Desmoglein-1 cell adhesion recognition sequence
KYCRALNSLD

SEQ ID NO: 4367 - protein, 11 aa, Artificial Sequence
  Representative cyclic modulating agent based on Desmoglein-1 cell adhesion recognition sequence
KYCRALNSMGD

SEQ ID NO: 4368 - protein, 11 aa, Artificial Sequence
  Representative cyclic modulating agent based on Desmoglein-1 cell adhesion recognition sequence
KYCRALNSLGD

SEQ ID NO: 4369 - protein, 7 aa, Artificial Sequence
  Representative cyclic modulating agent based on Desmoglein-1 cell adhesion recognition sequence
KIYRALD

SEQ ID NO: 4370 - protein, 8 aa, Artificial Sequence
  Representative cyclic modulating agent based on Desmoglein-1 cell adhesion recognition sequence
KIYRALND

SEQ ID NO: 4371 - protein, 9 aa, Artificial Sequence
  Representative cyclic modulating agent based on Desmoglein-1 cell adhesion recognition sequence
KIYRALNSD

SEQ ID NO: 4372 - protein, 10 aa, Artificial Sequence
  Representative cyclic modulating agent based on Desmoglein-1 cell adhesion recognition sequence
KIYRALNSMD

SEQ ID NO: 4373 - protein, 10 aa, Artificial Sequence
  Representative cyclic modulating agent based on Desmoglein-1 cell adhesion recognition sequence
KIYRALNSLD

SEQ ID NO: 4374 - protein, 11 aa, Artificial Sequence
  Representative cyclic modulating agent based on Desmoglein-1 cell adhesion recognition sequence
KIYRALNSMGD

SEQ ID NO: 4375 - protein, 11 aa, Artificial Sequence
  Representative cyclic modulating agent based on Desmoglein-1 cell adhesion recognition sequence
KIYRALNSLGD

SEQ ID NO: 4376 - protein, 5 aa, Artificial Sequence
  Representative cyclic modulating agent based on Desmoglein-1 cell adhesion recognition sequence
RALNS

SEQ ID NO: 4377 - protein, 6 aa, Artificial Sequence
  Representative cyclic modulating agent based on Desmoglein-1 cell adhesion recognition sequence
RALNSM

SEQ ID NO: 4378 - protein, 6 aa, Artificial Sequence
  Representative cyclic modulating agent based on Desmoglein-1 cell adhesion recognition sequence
RALNSL

SEQ ID NO: 4379 - protein, 7 aa, Artificial Sequence
  Representative cyclic modulating agent based on Desmoglein-1 cell adhesion recognition sequence
RALNSMG

SEQ ID NO: 4380 - protein, 7 aa, Artificial Sequence
  Representative cyclic modulating agent based on Desmoglein-1 cell adhesion recognition sequence
RALNSLG

SEQ ID NO: 4381 - protein, 5 aa, Artificial Sequence
  Representative cyclic modulating agent based on Desmoglein-1 cell adhesion recognition sequence
CRALN

SEQ ID NO: 4382 - protein, 6 aa, Artificial Sequence
  Representative cyclic modulating agent based on Desmoglein-1 cell adhesion recognition sequence
CRALNS

SEQ ID NO: 4383 - protein, 7 aa, Artificial Sequence
  Representative cyclic modulating agent based on Desmoglein-1 cell adhesion recognition sequence
CRALNSM

SEQ ID NO: 4384 - protein, 7 aa, Artificial Sequence
  Representative cyclic modulating agent based on Desmoglein-1 cell adhesion recognition sequence
CRALNSL

SEQ ID NO: 4385 - protein, 8 aa, Artificial Sequence
  Representative cyclic modulating agent based on Desmoglein-1 cell adhesion recognition sequence
CRALNSMG

SEQ ID NO: 4386 - protein, 8 aa, Artificial Sequence
  Representative cyclic modulating agent based on Desmoglein-1 cell adhesion recognition sequence
CRALNSLG

SEQ ID NO: 4387 - protein, 5 aa, Artificial Sequence
  Representative cyclic modulating agent based on Desmoglein-1 cell adhesion recognition sequence
YCRAL

SEQ ID NO: 4388 - protein, 6 aa, Artificial Sequence
  Representative cyclic modulating agent based on Desmoglein-1 cell adhesion recognition sequence
YCRALN

SEQ ID NO: 4389 - protein, 7 aa, Artificial Sequence
  Representative cyclic modulating agent based on Desmoglein-1 cell adhesion recognition sequence
YCRALNS

SEQ ID NO: 4390 - protein, 8 aa, Artificial Sequence
  Representative cyclic modulating agent based on Desmoglein-1 cell adhesion recognition sequence
YCRALNSM

SEQ ID NO: 4391 - protein, 8 aa, Artificial Sequence
  Representative cyclic modulating agent based on Desmoglein-1 cell adhesion recognition sequence
YCRALNSL

SEQ ID NO: 4392 - protein, 9 aa, Artificial Sequence
  Representative cyclic modulating agent based on Desmoglein-1 cell adhesion recognition sequence
YCRALNSMG

SEQ ID NO: 4393 - protein, 9 aa, Artificial Sequence
  Representative cyclic modulating agent based on Desmoglein-1 cell adhesion recognition sequence
YCRALNSLG

SEQ ID NO: 4394 - protein, 5 aa, Artificial Sequence
  Representative cyclic modulating agent based on Desmoglein-1 cell adhesion recognition sequence
IYRAL

SEQ ID NO: 4395 - protein, 6 aa, Artificial Sequence
  Representative cyclic modulating agent based on Desmoglein-1 cell adhesion recognition sequence
IYRALN

SEQ ID NO: 4396 - protein, 7 aa, Artificial Sequence
  Representative cyclic modulating agent based on Desmoglein-1 cell adhesion recognition sequence
IYRALNS

SEQ ID NO: 4397 - protein, 8 aa, Artificial Sequence
  Representative cyclic modulating agent based on Desmoglein-1 cell adhesion recognition sequence
IYRALNSM

SEQ ID NO: 4398 - protein, 8 aa, Artificial Sequence
  Representative cyclic modulating agent based on Desmoglein-1 cell adhesion recognition sequence
IYRALNSL

SEQ ID NO: 4399 - protein, 9 aa, Artificial Sequence
  Representative cyclic modulating agent based on Desmoglein-1 cell adhesion recognition sequence
IYRALNSMG

SEQ ID NO: 4400 - protein, 9 aa, Artificial Sequence
  Representative cyclic modulating agent based on Desmoglein-1 cell adhesion recognition sequence
IYRALNSLG

SEQ ID NO: 4401 - protein, 5 aa, Artificial Sequence
  Representative cyclic modulating agent based on Desmoglein-2 cell adhesion recognition sequence
CYALC

SEQ ID NO: 4402 - protein, 6 aa, Artificial Sequence
  Representative cyclic modulating agent based on Desmoglein-2 cell adhesion recognition sequence
CYALDC

SEQ ID NO: 4403 - protein, 7 aa, Artificial Sequence
  Representative cyclic modulating agent based on Desmoglein-2 cell adhesion recognition sequence
CYALDAC

SEQ ID NO: 4404 - protein, 8 aa, Artificial Sequence
  Representative cyclic modulating agent based on Desmoglein-2 cell adhesion recognition sequence
CYALDARC

SEQ ID NO: 4405 - protein, 9 aa, Artificial Sequence
  Representative cyclic modulating agent based on Desmoglein-2 cell adhesion recognition sequence
CYALDARGC

SEQ ID NO: 4406 - protein, 6 aa, Artificial Sequence
  Representative cyclic modulating agent based on Desmoglein-2 cell adhesion recognition sequence
CGYALC

SEQ ID NO: 4407 - protein, 7 aa, Artificial Sequence
  Representative cyclic modulating agent based on Desmoglein-2 cell adhesion recognition sequence
CGYALDC

SEQ ID NO: 4408 - protein, 8 aa, Artificial Sequence
  Representative cyclic modulating agent based on Desmoglein-2 cell adhesion recognition sequence
CGYALDAC

SEQ ID NO: 4409 - protein, 9 aa, Artificial Sequence
  Representative cyclic modulating agent based on Desmoglein-2 cell adhesion recognition sequence
CGYALDARC

SEQ ID NO: 4410 - protein, 10 aa, Artificial Sequence
  Representative cyclic modulating agent based on Desmoglein-2 cell adhesion recognition sequence
CGYALDARGC

SEQ ID NO: 4411 - protein, 7 aa, Artificial Sequence
  Representative cyclic modulating agent based on Desmoglein-2 cell adhesion recognition sequence
CTGYALC

SEQ ID NO: 4412 - protein, 8 aa, Artificial Sequence
  Representative cyclic modulating agent based on Desmoglein-2 cell adhesion recognition sequence
CTGYALDC

SEQ ID NO: 4413 - protein, 9 aa, Artificial Sequence
  Representative cyclic modulating agent based on Desmoglein-2 cell adhesion recognition sequence
CTGYALDAC

SEQ ID NO: 4414 - protein, 10 aa, Artificial Sequence
  Representative cyclic modulating agent based on Desmoglein-2 cell adhesion recognition sequence
CTGYALDARC

SEQ ID NO: 4415 - protein, 11 aa, Artificial Sequence
  Representative cyclic modulating agent based on Desmoglein-2 cell adhesion recognition sequence
CTGYALDARGC

SEQ ID NO: 4416 - protein, 8 aa, Artificial Sequence
  Representative cyclic modulating agent based on Desmoglein-2 cell adhesion recognition sequence
CLTGYALC

SEQ ID NO: 4417 - protein, 9 aa, Artificial Sequence
  Representative cyclic modulating agent based on Desmoglein-2 cell adhesion recognition sequence
CLTGYALDC

SEQ ID NO: 4418 - protein, 10 aa, Artificial Sequence
  Representative cyclic modulating agent based on Desmoglein-2 cell adhesion recognition sequence
CLTGYALDAC

SEQ ID NO: 4419 - protein, 11 aa, Artificial Sequence
  Representative cyclic modulating agent based on Desmoglein-2 cell adhesion recognition sequence
CLTGYALDARC

SEQ ID NO: 4420 - protein, 12 aa, Artificial Sequence
  Representative cyclic modulating agent based on Desmoglein-2 cell adhesion recognition sequence
CLTGYALDARGC

SEQ ID NO: 4421 - protein, 5 aa, Artificial Sequence
  Representative cyclic modulating agent based on Desmoglein-2 cell adhesion recognition sequence
EYALK

SEQ ID NO: 4422 - protein, 6 aa, Artificial Sequence
  Representative cyclic modulating agent based on Desmoglein-2 cell adhesion recognition sequence
EYALDK

SEQ ID NO: 4423 - protein, 7 aa, Artificial Sequence
  Representative cyclic modulating agent based on Desmoglein-2 cell adhesion recognition sequence
EYALDAK

SEQ ID NO: 4424 - protein, 8 aa, Artificial Sequence
  Representative cyclic modulating agent based on Desmoglein-2 cell adhesion recognition sequence
EYALDARK

SEQ ID NO: 4425 - protein, 9 aa, Artificial Sequence
  Representative cyclic modulating agent based on Desmoglein-2 cell adhesion recognition sequence
EYALDARGK

SEQ ID NO: 4426 - protein, 6 aa, Artificial Sequence
  Representative cyclic modulating agent based on Desmoglein-2 cell adhesion recognition sequence
EGYALK

SEQ ID NO: 4427 - protein, 7 aa, Artificial Sequence
  Representative cyclic modulating agent based on Desmoglein-2 cell adhesion recognition sequence
EGYALDK

SEQ ID NO: 4428 - protein, 8 aa, Artificial Sequence
  Representative cyclic modulating agent based on Desmoglein-2 cell adhesion recognition sequence
EGYALDAK

SEQ ID NO: 4429 - protein, 9 aa, Artificial Sequence
  Representative cyclic modulating agent based on Desmoglein-2 cell adhesion recognition sequence
EGYALDARK

SEQ ID NO: 4430 - protein, 10 aa, Artificial Sequence
  Representative cyclic modulating agent based on Desmoglein-2 cell adhesion recognition sequence
EGYALDARGK

SEQ ID NO: 4431 - protein, 7 aa, Artificial Sequence
  Representative cyclic modulating agent based on Desmoglein-2 cell adhesion recognition sequence
ETGYALK

SEQ ID NO: 4432 - protein, 8 aa, Artificial Sequence
  Representative cyclic modulating agent based on Desmoglein-2 cell adhesion recognition sequence
ETGYALDK

SEQ ID NO: 4433 - protein, 9 aa, Artificial Sequence
  Representative cyclic modulating agent based on Desmoglein-2 cell adhesion recognition sequence
ETGYALDAK

SEQ ID NO: 4434 - protein, 10 aa, Artificial Sequence
  Representative cyclic modulating agent based on Desmoglein-2 cell adhesion recognition sequence
ETGYALDARK

SEQ ID NO: 4435 - protein, 11 aa, Artificial Sequence
  Representative cyclic modulating agent based on Desmoglein-2 cell adhesion recognition sequence
ETGYALDARGK

SEQ ID NO: 4436 - protein, 8 aa, Artificial Sequence
  Representative cyclic modulating agent based on Desmoglein-2 cell adhesion recognition sequence
ELTGYALK

SEQ ID NO: 4437 - protein, 9 aa, Artificial Sequence
  Representative cyclic modulating agent based on Desmoglein-2 cell adhesion recognition sequence
ELTGYALDK

SEQ ID NO: 4438 - protein, 10 aa, Artificial Sequence
  Representative cyclic modulating agent based on Desmoglein-2 cell adhesion recognition sequence
ELTGYALDAK

SEQ ID NO: 4439 - protein, 11 aa, Artificial Sequence
  Representative cyclic modulating agent based on Desmoglein-2 cell adhesion recognition sequence
ELTGYALDARK

SEQ ID NO: 4440 - protein, 12 aa, Artificial Sequence
  Representative cyclic modulating agent based on Desmoglein-2 cell adhesion recognition sequence
ELTGYALDARGK

SEQ ID NO: 4441 - protein, 5 aa, Artificial Sequence
  Representative cyclic modulating agent based on Desmoglein-2 cell adhesion recognition sequence
KYALE

SEQ ID NO: 4442 - protein, 6 aa, Artificial Sequence
  Representative cyclic modulating agent based on Desmoglein-2 cell adhesion recognition sequence
KYALDE

SEQ ID NO: 4443 - protein, 7 aa, Artificial Sequence
  Representative cyclic modulating agent based on Desmoglein-2 cell adhesion recognition sequence
KYALDAE

SEQ ID NO: 4444 - protein, 8 aa, Artificial Sequence
  Representative cyclic modulating agent based on Desmoglein-2 cell adhesion recognition sequence
KYALDARE

SEQ ID NO: 4445 - protein, 9 aa, Artificial Sequence
  Representative cyclic modulating agent based on Desmoglein-2 cell adhesion recognition sequence
KYALDARGE

SEQ ID NO: 4446 - protein, 6 aa, Artificial Sequence
  Representative cyclic modulating agent based on Desmoglein-2 cell adhesion recognition sequence
KGYALE

SEQ ID NO: 4447 - protein, 7 aa, Artificial Sequence
  Representative cyclic modulating agent based on Desmoglein-2 cell adhesion recognition sequence
KGYALDE

SEQ ID NO: 4448 - protein, 8 aa, Artificial Sequence
  Representative cyclic modulating agent based on Desmoglein-2 cell adhesion recognition sequence
KGYALDAE

SEQ ID NO: 4449 - protein, 9 aa, Artificial Sequence
  Representative cyclic modulating agent based on Desmoglein-2 cell adhesion recognition sequence
KGYALDARE

SEQ ID NO: 4450 - protein, 10 aa, Artificial Sequence
  Representative cyclic modulating agent based on Desmoglein-2 cell adhesion recognition sequence
KGYALDARGE

SEQ ID NO: 4451 - protein, 7 aa, Artificial Sequence
  Representative cyclic modulating agent based on Desmoglein-2 cell adhesion recognition sequence
KTGYALE

SEQ ID NO: 4452 - protein, 8 aa, Artificial Sequence
  Representative cyclic modulating agent based on Desmoglein-2 cell adhesion recognition sequence
KTGYALDE

SEQ ID NO: 4453 - protein, 9 aa, Artificial Sequence
  Representative cyclic modulating agent based on Desmoglein-2 cell adhesion recognition sequence
KTGYALDAE

SEQ ID NO: 4454 - protein, 10 aa, Artificial Sequence
  Representative cyclic modulating agent based on Desmoglein-2 cell adhesion recognition sequence
KTGYALDARE

SEQ ID NO: 4455 - protein, 11 aa, Artificial Sequence
  Representative cyclic modulating agent based on Desmoglein-2 cell adhesion recognition sequence
KTGYALDARGE

SEQ ID NO: 4456 - protein, 8 aa, Artificial Sequence
  Representative cyclic modulating agent based on Desmoglein-2 cell adhesion recognition sequence
KLTGYALE

SEQ ID NO: 4457 - protein, 9 aa, Artificial Sequence
  Representative cyclic modulating agent based on Desmoglein-2 cell adhesion recognition sequence
KLTGYALDE

SEQ ID NO: 4458 - protein, 10 aa, Artificial Sequence
  Representative cyclic modulating agent based on Desmoglein-2 cell adhesion recognition sequence
KLTGYALDAE

SEQ ID NO: 4459 - protein, 11 aa, Artificial Sequence
  Representative cyclic modulating agent based on Desmoglein-2 cell adhesion recognition sequence
KLTGYALDARE

SEQ ID NO: 4460 - protein, 12 aa, Artificial Sequence
  Representative cyclic modulating agent based on Desmoglein-2 cell adhesion recognition sequence
KLTGYALDARGE

SEQ ID NO: 4461 - protein, 5 aa, Artificial Sequence
  Representative cyclic modulating agent based on Desmoglein-2 cell adhesion recognition sequence
DYALK

SEQ ID NO: 4462 - protein, 6 aa, Artificial Sequence
  Representative cyclic modulating agent based on Desmoglein-2 cell adhesion recognition sequence
DYALDK

SEQ ID NO: 4463 - protein, 7 aa, Artificial Sequence
  Representative cyclic modulating agent based on Desmoglein-2 cell adhesion recognition sequence
DYALDAK

SEQ ID NO: 4464 - protein, 8 aa, Artificial Sequence
  Representative cyclic modulating agent based on Desmoglein-2 cell adhesion recognition sequence
DYALDARK

SEQ ID NO: 4465 - protein, 9 aa, Artificial Sequence
  Representative cyclic modulating agent based on Desmoglein-2 cell adhesion recognition sequence
DYALDARGK

SEQ ID NO: 4466 - protein, 6 aa, Artificial Sequence
  Representative cyclic modulating agent based on Desmoglein-2 cell adhesion recognition sequence
DGYALK

SEQ ID NO: 4467 - protein, 7 aa, Artificial Sequence
  Representative cyclic modulating agent based on Desmoglein-2 cell adhesion recognition sequence
DGYALDK

SEQ ID NO: 4468 - protein, 8 aa, Artificial Sequence
  Representative cyclic modulating agent based on Desmoglein-2 cell adhesion recognition sequence
DGYALDAK

SEQ ID NO: 4469 - protein, 9 aa, Artificial Sequence
  Representative cyclic modulating agent based on Desmoglein-2 cell adhesion recognition sequence
DGYALDARK

SEQ ID NO: 4470 - protein, 10 aa, Artificial Sequence
  Representative cyclic modulating agent based on Desmoglein-2 cell adhesion recognition sequence
DGYALDARGK

SEQ ID NO: 4471 - protein, 7 aa, Artificial Sequence
  Representative cyclic modulating agent based on Desmoglein-2 cell adhesion recognition sequence
DTGYALK

SEQ ID NO: 4472 - protein, 8 aa, Artificial Sequence
  Representative cyclic modulating agent based on Desmoglein-2 cell adhesion recognition sequence
DTGYALDK

SEQ ID NO: 4473 - protein, 9 aa, Artificial Sequence
  Representative cyclic modulating agent based on Desmoglein-2 cell adhesion recognition sequence
DTGYALDAK

SEQ ID NO: 4474 - protein, 10 aa, Artificial Sequence
  Representative cyclic modulating agent based on Desmoglein-2 cell adhesion recognition sequence
DTGYALDARK

SEQ ID NO: 4475 - protein, 11 aa, Artificial Sequence
  Representative cyclic modulating agent based on Desmoglein-2 cell adhesion recognition sequence
DTGYALDARGK

SEQ ID NO: 4476 - protein, 8 aa, Artificial Sequence
  Representative cyclic modulating agent based on Desmoglein-2 cell adhesion recognition sequence
DLTGYALK

SEQ ID NO: 4477 - protein, 9 aa, Artificial Sequence
  Representative cyclic modulating agent based on Desmoglein-2 cell adhesion recognition sequence
DLTGYALDK

SEQ ID NO: 4478 - protein, 10 aa, Artificial Sequence
  Representative cyclic modulating agent based on Desmoglein-2 cell adhesion recognition sequence
DLTGYALDAK

SEQ ID NO: 4479 - protein, 11 aa, Artificial Sequence
  Representative cyclic modulating agent based on Desmoglein-2 cell adhesion recognition sequence
DLTGYALDARK

SEQ ID NO: 4480 - protein, 12 aa, Artificial Sequence
  Representative cyclic modulating agent based on Desmoglein-2 cell adhesion recognition sequence
DLTGYALDARGK

SEQ ID NO: 4481 - protein, 5 aa, Artificial Sequence
  Representative cyclic modulating agent based on Desmoglein-2 cell adhesion recognition sequence
KYALD

SEQ ID NO: 4482 - protein, 6 aa, Artificial Sequence
  Representative cyclic modulating agent based on Desmoglein-2 cell adhesion recognition sequence
KYALDD

SEQ ID NO: 4483 - protein, 7 aa, Artificial Sequence
  Representative cyclic modulating agent based on Desmoglein-2 cell adhesion recognition sequence
KYALDAD

SEQ ID NO: 4484 - protein, 8 aa, Artificial Sequence
  Representative cyclic modulating agent based on Desmoglein-2 cell adhesion recognition sequence
KYALDARD

SEQ ID NO: 4485 - protein, 9 aa, Artificial Sequence
  Representative cyclic modulating agent based on Desmoglein-2 cell adhesion recognition sequence
KYALDARGD

SEQ ID NO: 4486 - protein, 6 aa, Artificial Sequence
  Representative cyclic modulating agent based on Desmoglein-2 cell adhesion recognition sequence
KGYALD

SEQ ID NO: 4487 - protein, 7 aa, Artificial Sequence
  Representative cyclic modulating agent based on Desmoglein-2 cell adhesion recognition sequence
KGYALDD

SEQ ID NO: 4488 - protein, 8 aa, Artificial Sequence
  Representative cyclic modulating agent based on Desmoglein-2 cell adhesion recognition sequence
KGYALDAD

SEQ ID NO: 4489 - protein, 9 aa, Artificial Sequence
  Representative cyclic modulating agent based on Desmoglein-2 cell adhesion recognition sequence
KGYALDARD

SEQ ID NO: 4490 - protein, 10 aa, Artificial Sequence
  Representative cyclic modulating agent based on Desmoglein-2 cell adhesion recognition sequence
KGYALDARGD

SEQ ID NO: 4491 - protein, 7 aa, Artificial Sequence
  Representative cyclic modulating agent based on Desmoglein-2 cell adhesion recognition sequence
KTGYALD

SEQ ID NO: 4492 - protein, 8 aa, Artificial Sequence
  Representative cyclic modulating agent based on Desmoglein-2 cell adhesion recognition sequence
KTGYALDD

SEQ ID NO: 4493 - protein, 9 aa, Artificial Sequence
  Representative cyclic modulating agent based on Desmoglein-2 cell adhesion recognition sequence
KTGYALDAD

SEQ ID NO: 4494 - protein, 10 aa, Artificial Sequence
  Representative cyclic modulating agent based on Desmoglein-2 cell adhesion recognition sequence
KTGYALDARD

SEQ ID NO: 4495 - protein, 11 aa, Artificial Sequence
  Representative cyclic modulating agent based on Desmoglein-2 cell adhesion recognition sequence
KTGYALDARGD

SEQ ID NO: 4496 - protein, 8 aa, Artificial Sequence
  Representative cyclic modulating agent based on Desmoglein-2 cell adhesion recognition sequence
KLTGYALD

SEQ ID NO: 4497 - protein, 9 aa, Artificial Sequence
  Representative cyclic modulating agent based on Desmoglein-2 cell adhesion recognition sequence
KLTGYALDD

SEQ ID NO: 4498 - protein, 10 aa, Artificial Sequence
  Representative cyclic modulating agent based on Desmoglein-2 cell adhesion recognition sequence
KLTGYALDAD

SEQ ID NO: 4499 - protein, 11 aa, Artificial Sequence
  Representative cyclic modulating agent based on Desmoglein-2 cell adhesion recognition sequence
KLTGYALDARD

SEQ ID NO: 4500 - protein, 12 aa, Artificial Sequence
  Representative cyclic modulating agent based on Desmoglein-2 cell adhesion recognition sequence
KLTGYALDARGD

SEQ ID NO: 4501 - protein, 5 aa, Artificial Sequence
  Representative cyclic modulating agent based on Desmoglein-2 cell adhesion recognition sequence
YALDA

SEQ ID NO: 4502 - protein, 6 aa, Artificial Sequence
  Representative cyclic modulating agent based on Desmoglein-2 cell adhesion recognition sequence
YALDAR

SEQ ID NO: 4503 - protein, 7 aa, Artificial Sequence
  Representative cyclic modulating agent based on Desmoglein-2 cell adhesion recognition sequence
YALDARG

SEQ ID NO: 4504 - protein, 5 aa, Artificial Sequence
  Representative cyclic modulating agent based on Desmoglein-2 cell adhesion recognition sequence
GYALD

SEQ ID NO: 4505 - protein, 6 aa, Artificial Sequence
  Representative cyclic modulating agent based on Desmoglein-2 cell adhesion recognition sequence
GYALDA

SEQ ID NO: 4506 - protein, 7 aa, Artificial Sequence
  Representative cyclic modulating agent based on Desmoglein-2 cell adhesion recognition sequence
GYALDAR

SEQ ID NO: 4507 - protein, 8 aa, Artificial Sequence
  Representative cyclic modulating agent based on Desmoglein-2 cell adhesion recognition sequence
GYALDARG

SEQ ID NO: 4508 - protein, 5 aa, Artificial Sequence
  Representative cyclic modulating agent based on Desmoglein-2 cell adhesion recognition sequence
TGYAL

SEQ ID NO: 4509 - protein, 6 aa, Artificial Sequence
  Representative cyclic modulating agent based on Desmoglein-2 cell adhesion recognition sequence
TGYALD

SEQ ID NO: 4510 - protein, 7 aa, Artificial Sequence
  Representative cyclic modulating agent based on Desmoglein-2 cell adhesion recognition sequence
TGYALDA

SEQ ID NO: 4511 - protein, 8 aa, Artificial Sequence
  Representative cyclic modulating agent based on Desmoglein-2 cell adhesion recognition sequence
TGYALDAR

SEQ ID NO: 4512 - protein, 9 aa, Artificial Sequence
  Representative cyclic modulating agent based on Desmoglein-2 cell adhesion recognition sequence
TGYALDARG

SEQ ID NO: 4513 - protein, 6 aa, Artificial Sequence
  Representative cyclic modulating agent based on Desmoglein-2 cell adhesion recognition sequence
LTGYAL

SEQ ID NO: 4514 - protein, 7 aa, Artificial Sequence
  Representative cyclic modulating agent based on Desmoglein-2 cell adhesion recognition sequence
LTGYALD

SEQ ID NO: 4515 - protein, 8 aa, Artificial Sequence
  Representative cyclic modulating agent based on Desmoglein-2 cell adhesion recognition sequence
LTGYALDA

SEQ ID NO: 4516 - protein, 9 aa, Artificial Sequence
  Representative cyclic modulating agent based on Desmoglein-2 cell adhesion recognition sequence
LTGYALDAR

SEQ ID NO: 4517 - protein, 10 aa, Artificial Sequence
  Representative cyclic modulating agent based on Desmoglein-2 cell adhesion recognition sequence
LTGYALDARG

SEQ ID NO: 4518 - protein, 5 aa, Artificial Sequence
  Representative cyclic modulating agent based on Desmoglein-3 cell adhesion recognition sequence
CRALC

SEQ ID NO: 4519 - protein, 6 aa, Artificial Sequence
  Representative cyclic modulating agent based on Desmoglein-3 cell adhesion recognition sequence
CRALNC

SEQ ID NO: 4520 - protein, 7 aa, Artificial Sequence
  Representative cyclic modulating agent based on Desmoglein-3 cell adhesion recognition sequence
CRALNAC

SEQ ID NO: 4521 - protein, 8 aa, Artificial Sequence
  Representative cyclic modulating agent based on Desmoglein-3 cell adhesion recognition sequence
CRALNAQC

SEQ ID NO: 4522 - protein, 8 aa, Artificial Sequence
  Representative cyclic modulating agent based on Desmoglein-3 cell adhesion recognition sequence
CRALNALC

SEQ ID NO: 4523 - protein, 9 aa, Artificial Sequence
  Representative cyclic modulating agent based on Desmoglein-3 cell adhesion recognition sequence
CRALNAQGC

SEQ ID NO: 4524 - protein, 9 aa, Artificial Sequence
  Representative cyclic modulating agent based on Desmoglein-3 cell adhesion recognition sequence
CRALNALGC

SEQ ID NO: 4525 - protein, 6 aa, Artificial Sequence
  Representative cyclic modulating agent based on Desmoglein-3 cell adhesion recognition sequence
CCRALC

SEQ ID NO: 4526 - protein, 7 aa, Artificial Sequence
  Representative cyclic modulating agent based on Desmoglein-3 cell adhesion recognition sequence
CCRALNC

SEQ ID NO: 4527 - protein, 8 aa, Artificial Sequence
  Representative cyclic modulating agent based on Desmoglein-3 cell adhesion recognition sequence
CCRALNAC

SEQ ID NO: 4528 - protein, 9 aa, Artificial Sequence
  Representative cyclic modulating agent based on Desmoglein-3 cell adhesion recognition sequence
CCRALNAQC

SEQ ID NO: 4529 - protein, 9 aa, Artificial Sequence
  Representative cyclic modulating agent based on Desmoglein-3 cell adhesion recognition sequence
CCRALNALC

SEQ ID NO: 4530 - protein, 10 aa, Artificial Sequence
  Representative cyclic modulating agent based on Desmoglein-3 cell adhesion recognition sequence
CCRALNAQGC

SEQ ID NO: 4531 - protein, 10 aa, Artificial Sequence
  Representative cyclic modulating agent based on Desmoglein-3 cell adhesion recognition sequence
CCRALNALGC

SEQ ID NO: 4532 - protein, 7 aa, Artificial Sequence
  Representative cyclic modulating agent based on Desmoglein-3 cell adhesion recognition sequence
CTCRALC

SEQ ID NO: 4533 - protein, 8 aa, Artificial Sequence
  Representative cyclic modulating agent based on Desmoglein-3 cell adhesion recognition sequence
CTCRALNC

SEQ ID NO: 4534 - protein, 9 aa, Artificial Sequence
  Representative cyclic modulating agent based on Desmoglein-3 cell adhesion recognition sequence
CTCRALNAC

SEQ ID NO: 4535 - protein, 10 aa, Artificial Sequence
  Representative cyclic modulating agent based on Desmoglein-3 cell adhesion recognition sequence
CTCRALNAQC

SEQ ID NO: 4536 - protein, 10 aa, Artificial Sequence
  Representative cyclic modulating agent based on Desmoglein-3 cell adhesion recognition sequence
CTCRALNALC

SEQ ID NO: 4537 - protein, 11 aa, Artificial Sequence
  Representative cyclic modulating agent based on Desmoglein-3 cell adhesion recognition sequence
CTCRALNAQGC

SEQ ID NO: 4538 - protein, 11 aa, Artificial Sequence
  Representative cyclic modulating agent based on Desmoglein-3 cell adhesion recognition sequence
CTCRALNALGC

SEQ ID NO: 4539 - protein, 8 aa, Artificial Sequence
  Representative cyclic modulating agent based on Desmoglein-3 cell adhesion recognition sequence
CITCRALC

SEQ ID NO: 4540 - protein, 9 aa, Artificial Sequence
  Representative cyclic modulating agent based on Desmoglein-3 cell adhesion recognition sequence
CITCRALNC

SEQ ID NO: 4541 - protein, 10 aa, Artificial Sequence
  Representative cyclic modulating agent based on Desmoglein-3 cell adhesion recognition sequence
CITCRALNAC

SEQ ID NO: 4542 - protein, 11 aa, Artificial Sequence
  Representative cyclic modulating agent based on Desmoglein-3 cell adhesion recognition sequence
CITCRALNAQC

SEQ ID NO: 4543 - protein, 11 aa, Artificial Sequence
  Representative cyclic modulating agent based on Desmoglein-3 cell adhesion recognition sequence
CITCRALNALC

SEQ ID NO: 4544 - protein, 12 aa, Artificial Sequence
  Representative cyclic modulating agent based on Desmoglein-3 cell adhesion recognition sequence
CITCRALNAQGC

SEQ ID NO: 4545 - protein, 12 aa, Artificial Sequence
  Representative cyclic modulating agent based on Desmoglein-3 cell adhesion recognition sequence
CITCRALNALGC

SEQ ID NO: 4546 - protein, 5 aa, Artificial Sequence
  Representative cyclic modulating agent based on Desmoglein-3 cell adhesion recognition sequence
ERALK

SEQ ID NO: 4547 - protein, 6 aa, Artificial Sequence
  Representative cyclic modulating agent based on Desmoglein-3 cell adhesion recognition sequence
ERALNK

SEQ ID NO: 4548 - protein, 7 aa, Artificial Sequence
  Representative cyclic modulating agent based on Desmoglein-3 cell adhesion recognition sequence
ERALNAK

SEQ ID NO: 4549 - protein, 8 aa, Artificial Sequence
  Representative cyclic modulating agent based on Desmoglein-3 cell adhesion recognition sequence
ERALNAQK

SEQ ID NO: 4550 - protein, 8 aa, Artificial Sequence
  Representative cyclic modulating agent based on Desmoglein-3 cell adhesion recognition sequence
ERALNALK

SEQ ID NO: 4551 - protein, 9 aa, Artificial Sequence
  Representative cyclic modulating agent based on Desmoglein-3 cell adhesion recognition sequence
ERALNAQGK

SEQ ID NO: 4552 - protein, 9 aa, Artificial Sequence
  Representative cyclic modulating agent based on Desmoglein-3 cell adhesion recognition sequence
ERALNALGK

SEQ ID NO: 4553 - protein, 6 aa, Artificial Sequence
  Representative cyclic modulating agent based on Desmoglein-3 cell adhesion recognition sequence
ECRALK

SEQ ID NO: 4554 - protein, 7 aa, Artificial Sequence
  Representative cyclic modulating agent based on Desmoglein-3 cell adhesion recognition sequence
ECRALNK

SEQ ID NO: 4555 - protein, 8 aa, Artificial Sequence
  Representative cyclic modulating agent based on Desmoglein-3 cell adhesion recognition sequence
ECRALNAK

SEQ ID NO: 4556 - protein, 9 aa, Artificial Sequence
  Representative cyclic modulating agent based on Desmoglein-3 cell adhesion recognition sequence
ECRALNAQK

SEQ ID NO: 4557 - protein, 9 aa, Artificial Sequence
  Representative cyclic modulating agent based on Desmoglein-3 cell adhesion recognition sequence
ECRALNALK

SEQ ID NO: 4558 - protein, 10 aa, Artificial Sequence
  Representative cyclic modulating agent based on Desmoglein-3 cell adhesion recognition sequence
ECRALNAQGK

SEQ ID NO: 4559 - protein, 10 aa, Artificial Sequence
  Representative cyclic modulating agent based on Desmoglein-3 cell adhesion recognition sequence
ECRALNALGK

SEQ ID NO: 4560 - protein, 7 aa, Artificial Sequence
  Representative cyclic modulating agent based on Desmoglein-3 cell adhesion recognition sequence
ETCRALK

SEQ ID NO: 4561 - protein, 8 aa, Artificial Sequence
  Representative cyclic modulating agent based on Desmoglein-3 cell adhesion recognition sequence
ETCRALNK

SEQ ID NO: 4562 - protein, 9 aa, Artificial Sequence
  Representative cyclic modulating agent based on Desmoglein-3 cell adhesion recognition sequence
ETCRALNAK

SEQ ID NO: 4563 - protein, 10 aa, Artificial Sequence
  Representative cyclic modulating agent based on Desmoglein-3 cell adhesion recognition sequence
ETCRALNAQK

SEQ ID NO: 4564 - protein, 10 aa, Artificial Sequence
  Representative cyclic modulating agent based on Desmoglein-3 cell adhesion recognition sequence
ETCRALNALK

SEQ ID NO: 4565 - protein, 11 aa, Artificial Sequence
  Representative cyclic modulating agent based on Desmoglein-3 cell adhesion recognition sequence
ETCRALNAQGK

SEQ ID NO: 4566 - protein, 11 aa, Artificial Sequence
  Representative cyclic modulating agent based on Desmoglein-3 cell adhesion recognition sequence
ETCRALNALGK

SEQ ID NO: 4567 - protein, 8 aa, Artificial Sequence
  Representative cyclic modulating agent based on Desmoglein-3 cell adhesion recognition sequence
EITCRALK

SEQ ID NO: 4568 - protein, 9 aa, Artificial Sequence
  Representative cyclic modulating agent based on Desmoglein-3 cell adhesion recognition sequence
EITCRALNK

SEQ ID NO: 4569 - protein, 10 aa, Artificial Sequence
  Representative cyclic modulating agent based on Desmoglein-3 cell adhesion recognition sequence
EITCRALNAK

SEQ ID NO: 4570 - protein, 11 aa, Artificial Sequence
  Representative cyclic modulating agent based on Desmoglein-3 cell adhesion recognition sequence
EITCRALNAQK

SEQ ID NO: 4571 - protein, 11 aa, Artificial Sequence
  Representative cyclic modulating agent based on Desmoglein-3 cell adhesion recognition sequence
EITCRALNALK

SEQ ID NO: 4572 - protein, 12 aa, Artificial Sequence
  Representative cyclic modulating agent based on Desmoglein-3 cell adhesion recognition sequence
EITCRALNAQGK

SEQ ID NO: 4573 - protein, 12 aa, Artificial Sequence
  Representative cyclic modulating agent based on Desmoglein-3 cell adhesion recognition sequence
EITCRALNALGK

SEQ ID NO: 4574 - protein, 5 aa, Artificial Sequence
  Representative cyclic modulating agent based on Desmoglein-3 cell adhesion recognition sequence
KRALE

SEQ ID NO: 4575 - protein, 6 aa, Artificial Sequence
  Representative cyclic modulating agent based on Desmoglein-3 cell adhesion recognition sequence
KRALNE

SEQ ID NO: 4576 - protein, 7 aa, Artificial Sequence
  Representative cyclic modulating agent based on Desmoglein-3 cell adhesion recognition sequence
KRALNAE

SEQ ID NO: 4577 - protein, 8 aa, Artificial Sequence
  Representative cyclic modulating agent based on Desmoglein-3 cell adhesion recognition sequence
KRALNAQE

SEQ ID NO: 4578 - protein, 8 aa, Artificial Sequence
  Representative cyclic modulating agent based on Desmoglein-3 cell adhesion recognition sequence
KRALNALE

SEQ ID NO: 4579 - protein, 9 aa, Artificial Sequence
  Representative cyclic modulating agent based on Desmoglein-3 cell adhesion recognition sequence
KRALNAQGE

SEQ ID NO: 4580 - protein, 9 aa, Artificial Sequence
  Representative cyclic modulating agent based on Desmoglein-3 cell adhesion recognition sequence
KRALNALGE

SEQ ID NO: 4581 - protein, 6 aa, Artificial Sequence
  Representative cyclic modulating agent based on Desmoglein-3 cell adhesion recognition sequence
KCRALE

SEQ ID NO: 4582 - protein, 7 aa, Artificial Sequence
  Representative cyclic modulating agent based on Desmoglein-3 cell adhesion recognition sequence
KCRALNE

SEQ ID NO: 4583 - protein, 8 aa, Artificial Sequence
  Representative cyclic modulating agent based on Desmoglein-3 cell adhesion recognition sequence
KCRALNAE

SEQ ID NO: 4584 - protein, 9 aa, Artificial Sequence
  Representative cyclic modulating agent based on Desmoglein-3 cell adhesion recognition sequence
KCRALNAQE

SEQ ID NO: 4585 - protein, 9 aa, Artificial Sequence
  Representative cyclic modulating agent based on Desmoglein-3 cell adhesion recognition sequence
KCRALNALE

SEQ ID NO: 4586 - protein, 10 aa, Artificial Sequence
  Representative cyclic modulating agent based on Desmoglein-3 cell adhesion recognition sequence
KCRALNAQGE

SEQ ID NO: 4587 - protein, 10 aa, Artificial Sequence
  Representative cyclic modulating agent based on Desmoglein-3 cell adhesion recognition sequence
KCRALNALGE

SEQ ID NO: 4588 - protein, 7 aa, Artificial Sequence
  Representative cyclic modulating agent based on Desmoglein-3 cell adhesion recognition sequence
KTCRALE

SEQ ID NO: 4589 - protein, 8 aa, Artificial Sequence
  Representative cyclic modulating agent based on Desmoglein-3 cell adhesion recognition sequence
KTCRALNE

SEQ ID NO: 4590 - protein, 9 aa, Artificial Sequence
  Representative cyclic modulating agent based on Desmoglein-3 cell adhesion recognition sequence
KTCRALNAE

SEQ ID NO: 4591 - protein, 10 aa, Artificial Sequence
  Representative cyclic modulating agent based on Desmoglein-3 cell adhesion recognition sequence
KTCRALNAQE

SEQ ID NO: 4592 - protein, 10 aa, Artificial Sequence
  Representative cyclic modulating agent based on Desmoglein-3 cell adhesion recognition sequence
KTCRALNALE

SEQ ID NO: 4593 - protein, 11 aa, Artificial Sequence
  Representative cyclic modulating agent based on Desmoglein-3 cell adhesion recognition sequence
KTCRALNAQGE

SEQ ID NO: 4594 - protein, 11 aa, Artificial Sequence
  Representative cyclic modulating agent based on Desmoglein-3 cell adhesion recognition sequence
KTCRALNALGE

SEQ ID NO: 4595 - protein, 8 aa, Artificial Sequence
  Representative cyclic modulating agent based on Desmoglein-3 cell adhesion recognition sequence
KITCRALE

SEQ ID NO: 4596 - protein, 9 aa, Artificial Sequence
  Representative cyclic modulating agent based on Desmoglein-3 cell adhesion recognition sequence
KITCRALNE

SEQ ID NO: 4597 - protein, 10 aa, Artificial Sequence
  Representative cyclic modulating agent based on Desmoglein-3 cell adhesion recognition sequence
KITCRALNAE

SEQ ID NO: 4598 - protein, 11 aa, Artificial Sequence
  Representative cyclic modulating agent based on Desmoglein-3 cell adhesion recognition sequence
KITCRALNAQE

SEQ ID NO: 4599 - protein, 11 aa, Artificial Sequence
  Representative cyclic modulating agent based on Desmoglein-3 cell adhesion recognition sequence
KITCRALNALE

SEQ ID NO: 4600 - protein, 12 aa, Artificial Sequence
  Representative cyclic modulating agent based on Desmoglein-3 cell adhesion recognition sequence
KITCRALNAQGE

SEQ ID NO: 4601 - protein, 12 aa, Artificial Sequence
  Representative cyclic modulating agent based on Desmoglein-3 cell adhesion recognition sequence
KITCRALNALGE

SEQ ID NO: 4602 - protein, 5 aa, Artificial Sequence
  Representative cyclic modulating agent based on Desmoglein-3 cell adhesion recognition sequence
DRALK

SEQ ID NO: 4603 - protein, 6 aa, Artificial Sequence
  Representative cyclic modulating agent based on Desmoglein-3 cell adhesion recognition sequence
DRALNK

SEQ ID NO: 4604 - protein, 7 aa, Artificial Sequence
  Representative cyclic modulating agent based on Desmoglein-3 cell adhesion recognition sequence
DRALNAK

SEQ ID NO: 4605 - protein, 8 aa, Artificial Sequence
  Representative cyclic modulating agent based on Desmoglein-3 cell adhesion recognition sequence
DRALNAQK

SEQ ID NO: 4606 - protein, 8 aa, Artificial Sequence
  Representative cyclic modulating agent based on Desmoglein-3 cell adhesion recognition sequence
DRALNALK

SEQ ID NO: 4607 - protein, 9 aa, Artificial Sequence
  Representative cyclic modulating agent based on Desmoglein-3 cell adhesion recognition sequence
DRALNAQGK

SEQ ID NO: 4608 - protein, 9 aa, Artificial Sequence
  Representative cyclic modulating agent based on Desmoglein-3 cell adhesion recognition sequence
DRALNALGK

SEQ ID NO: 4609 - protein, 6 aa, Artificial Sequence
  Representative cyclic modulating agent based on Desmoglein-3 cell adhesion recognition sequence
DCRALK

SEQ ID NO: 4610 - protein, 7 aa, Artificial Sequence
  Representative cyclic modulating agent based on Desmoglein-3 cell adhesion recognition sequence
DCRALNK

SEQ ID NO: 4611 - protein, 8 aa, Artificial Sequence
  Representative cyclic modulating agent based on Desmoglein-3 cell adhesion recognition sequence
DCRALNAK

SEQ ID NO: 4612 - protein, 9 aa, Artificial Sequence
  Representative cyclic modulating agent based on Desmoglein-3 cell adhesion recognition sequence
DCRALNAQK

SEQ ID NO: 4613 - protein, 9 aa, Artificial Sequence
  Representative cyclic modulating agent based on Desmoglein-3 cell adhesion recognition sequence
DCRALNALK

SEQ ID NO: 4614 - protein, 10 aa, Artificial Sequence
  Representative cyclic modulating agent based on Desmoglein-3 cell adhesion recognition sequence
DCRALNAQGK

SEQ ID NO: 4615 - protein, 10 aa, Artificial Sequence
  Representative cyclic modulating agent based on Desmoglein-3 cell adhesion recognition sequence
DCRALNALGK

SEQ ID NO: 4616 - protein, 7 aa, Artificial Sequence
  Representative cyclic modulating agent based on Desmoglein-3 cell adhesion recognition sequence
DTCRALK

SEQ ID NO: 4617 - protein, 8 aa, Artificial Sequence
  Representative cyclic modulating agent based on Desmoglein-3 cell adhesion recognition sequence
DTCRALNK

SEQ ID NO: 4618 - protein, 9 aa, Artificial Sequence
  Representative cyclic modulating agent based on Desmoglein-3 cell adhesion recognition sequence
DTCRALNAK

SEQ ID NO: 4619 - protein, 10 aa, Artificial Sequence
  Representative cyclic modulating agent based on Desmoglein-3 cell adhesion recognition sequence
DTCRALNAQK

SEQ ID NO: 4620 - protein, 10 aa, Artificial Sequence
  Representative cyclic modulating agent based on Desmoglein-3 cell adhesion recognition sequence
DTCRALNALK

SEQ ID NO: 4621 - protein, 11 aa, Artificial Sequence
  Representative cyclic modulating agent based on Desmoglein-3 cell adhesion recognition sequence
DTCRALNAQGK

SEQ ID NO: 4622 - protein, 11 aa, Artificial Sequence
  Representative cyclic modulating agent based on Desmoglein-3 cell adhesion recognition sequence
DTCRALNALGK

SEQ ID NO: 4623 - protein, 8 aa, Artificial Sequence
  Representative cyclic modulating agent based on Desmoglein-3 cell adhesion recognition sequence
DITCRALK

SEQ ID NO: 4624 - protein, 9 aa, Artificial Sequence
  Representative cyclic modulating agent based on Desmoglein-3 cell adhesion recognition sequence
DITCRALNK

SEQ ID NO: 4625 - protein, 10 aa, Artificial Sequence
  Representative cyclic modulating agent based on Desmoglein-3 cell adhesion recognition sequence
DITCRALNAK

SEQ ID NO: 4626 - protein, 11 aa, Artificial Sequence
  Representative cyclic modulating agent based on Desmoglein-3 cell adhesion recognition sequence
DITCRALNAQK

SEQ ID NO: 4627 - protein, 11 aa, Artificial Sequence
  Representative cyclic modulating agent based on Desmoglein-3 cell adhesion recognition sequence
DITCRALNALK

SEQ ID NO: 4628 - protein, 12 aa, Artificial Sequence
  Representative cyclic modulating agent based on Desmoglein-3 cell adhesion recognition sequence
DITCRALNAQGK

SEQ ID NO: 4629 - protein, 12 aa, Artificial Sequence
  Representative cyclic modulating agent based on Desmoglein-3 cell adhesion recognition sequence
DITCRALNALGK

SEQ ID NO: 4630 - protein, 5 aa, Artificial Sequence
  Representative cyclic modulating agent based on Desmoglein-3 cell adhesion recognition sequence
KRALD

SEQ ID NO: 4631 - protein, 6 aa, Artificial Sequence
  Representative cyclic modulating agent based on Desmoglein-3 cell adhesion recognition sequence
KRALND

SEQ ID NO: 4632 - protein, 7 aa, Artificial Sequence
  Representative cyclic modulating agent based on Desmoglein-3 cell adhesion recognition sequence
KRALNAD

SEQ ID NO: 4633 - protein, 8 aa, Artificial Sequence
  Representative cyclic modulating agent based on Desmoglein-3 cell adhesion recognition sequence
KRALNAQD

SEQ ID NO: 4634 - protein, 8 aa, Artificial Sequence
  Representative cyclic modulating agent based on Desmoglein-3 cell adhesion recognition sequence
KRALNALD

SEQ ID NO: 4635 - protein, 9 aa, Artificial Sequence
  Representative cyclic modulating agent based on Desmoglein-3 cell adhesion recognition sequence
KRALNAQGD

SEQ ID NO: 4636 - protein, 9 aa, Artificial Sequence
  Representative cyclic modulating agent based on Desmoglein-3 cell adhesion recognition sequence
KRALNALGD

SEQ ID NO: 4637 - protein, 6 aa, Artificial Sequence
  Representative cyclic modulating agent based on Desmoglein-3 cell adhesion recognition sequence
KCRALD

SEQ ID NO: 4638 - protein, 7 aa, Artificial Sequence
  Representative cyclic modulating agent based on Desmoglein-3 cell adhesion recognition sequence
KCRALND

SEQ ID NO: 4639 - protein, 8 aa, Artificial Sequence
  Representative cyclic modulating agent based on Desmoglein-3 cell adhesion recognition sequence
KCRALNAD

SEQ ID NO: 4640 - protein, 9 aa, Artificial Sequence
  Representative cyclic modulating agent based on Desmoglein-3 cell adhesion recognition sequence
KCRALNAQD

SEQ ID NO: 4641 - protein, 9 aa, Artificial Sequence
  Representative cyclic modulating agent based on Desmoglein-3 cell adhesion recognition sequence
KCRALNALD

SEQ ID NO: 4642 - protein, 10 aa, Artificial Sequence
  Representative cyclic modulating agent based on Desmoglein-3 cell adhesion recognition sequence
KCRALNAQGD

SEQ ID NO: 4643 - protein, 10 aa, Artificial Sequence
  Representative cyclic modulating agent based on Desmoglein-3 cell adhesion recognition sequence
KCRALNALGD

SEQ ID NO: 4644 - protein, 7 aa, Artificial Sequence
  Representative cyclic modulating agent based on Desmoglein-3 cell adhesion recognition sequence
KTCRALD

SEQ ID NO: 4645 - protein, 8 aa, Artificial Sequence
  Representative cyclic modulating agent based on Desmoglein-3 cell adhesion recognition sequence
KTCRALND

SEQ ID NO: 4646 - protein, 9 aa, Artificial Sequence
  Representative cyclic modulating agent based on Desmoglein-3 cell adhesion recognition sequence
KTCRALNAD

SEQ ID NO: 4647 - protein, 10 aa, Artificial Sequence
  Representative cyclic modulating agent based on Desmoglein-3 cell adhesion recognition sequence
KTCRALNAQD

SEQ ID NO: 4648 - protein, 10 aa, Artificial Sequence
  Representative cyclic modulating agent based on Desmoglein-3 cell adhesion recognition sequence
KTCRALNALD

SEQ ID NO: 4649 - protein, 11 aa, Artificial Sequence
  Representative cyclic modulating agent based on Desmoglein-3 cell adhesion recognition sequence
KTCRALNAQGD

SEQ ID NO: 4650 - protein, 11 aa, Artificial Sequence
  Representative cyclic modulating agent based on Desmoglein-3 cell adhesion recognition sequence
KTCRALNALGD

SEQ ID NO: 4651 - protein, 8 aa, Artificial Sequence
  Representative cyclic modulating agent based on Desmoglein-3 cell adhesion recognition sequence
KITCRALD

SEQ ID NO: 4652 - protein, 9 aa, Artificial Sequence
  Representative cyclic modulating agent based on Desmoglein-3 cell adhesion recognition sequence
KITCRALND

SEQ ID NO: 4653 - protein, 10 aa, Artificial Sequence
  Representative cyclic modulating agent based on Desmoglein-3 cell adhesion recognition sequence
KITCRALNAD

SEQ ID NO: 4654 - protein, 11 aa, Artificial Sequence
  Representative cyclic modulating agent based on Desmoglein-3 cell adhesion recognition sequence
KITCRALNAQD

SEQ ID NO: 4655 - protein, 11 aa, Artificial Sequence
  Representative cyclic modulating agent based on Desmoglein-3 cell adhesion recognition sequence
KITCRALNALD

SEQ ID NO: 4656 - protein, 12 aa, Artificial Sequence
  Representative cyclic modulating agent based on Desmoglein-3 cell adhesion recognition sequence
KITCRALNAQGD

SEQ ID NO: 4657 - protein, 12 aa, Artificial Sequence
  Representative cyclic modulating agent based on Desmoglein-3 cell adhesion recognition sequence
KITCRALNALGD

SEQ ID NO: 4658 - protein, 5 aa, Artificial Sequence
  Representative cyclic modulating agent based on Desmoglein-3 cell adhesion recognition sequence
RALNA

SEQ ID NO: 4659 - protein, 6 aa, Artificial Sequence
  Representative cyclic modulating agent based on Desmoglein-3 cell adhesion recognition sequence
RALNAQ

SEQ ID NO: 4660 - protein, 6 aa, Artificial Sequence
  Representative cyclic modulating agent based on Desmoglein-3 cell adhesion recognition sequence
RALNAL

SEQ ID NO: 4661 - protein, 7 aa, Artificial Sequence
  Representative cyclic modulating agent based on Desmoglein-3 cell adhesion recognition sequence
RALNAQG

SEQ ID NO: 4662 - protein, 7 aa, Artificial Sequence
  Representative cyclic modulating agent based on Desmoglein-3 cell adhesion recognition sequence
RALNALG

SEQ ID NO: 4663 - protein, 5 aa, Artificial Sequence
  Representative cyclic modulating agent based on Desmoglein-3 cell adhesion recognition sequence
CRALN

SEQ ID NO: 4664 - protein, 6 aa, Artificial Sequence
  Representative cyclic modulating agent based on Desmoglein-3 cell adhesion recognition sequence
CRALNA

SEQ ID NO: 4665 - protein, 7 aa, Artificial Sequence
  Representative cyclic modulating agent based on Desmoglein-3 cell adhesion recognition sequence
CRALNAQ

SEQ ID NO: 4666 - protein, 7 aa, Artificial Sequence
  Representative cyclic modulating agent based on Desmoglein-3 cell adhesion recognition sequence
CRALNAL

SEQ ID NO: 4667 - protein, 8 aa, Artificial Sequence
  Representative cyclic modulating agent based on Desmoglein-3 cell adhesion recognition sequence
CRALNAQG

SEQ ID NO: 4668 - protein, 8 aa, Artificial Sequence
  Representative cyclic modulating agent based on Desmoglein-3 cell adhesion recognition sequence
CRALNALG

SEQ ID NO: 4669 - protein, 5 aa, Artificial Sequence
  Representative cyclic modulating agent based on Desmoglein-3 cell adhesion recognition sequence
TCRAL

SEQ ID NO: 4670 - protein, 6 aa, Artificial Sequence
  Representative cyclic modulating agent based on Desmoglein-3 cell adhesion recognition sequence
TCRALN

SEQ ID NO: 4671 - protein, 7 aa, Artificial Sequence
  Representative cyclic modulating agent based on Desmoglein-3 cell adhesion recognition sequence
TCRALNA

SEQ ID NO: 4672 - protein, 8 aa, Artificial Sequence
  Representative cyclic modulating agent based on Desmoglein-3 cell adhesion recognition sequence
TCRALNAQ

SEQ ID NO: 4673 - protein, 8 aa, Artificial Sequence
  Representative cyclic modulating agent based on Desmoglein-3 cell adhesion recognition sequence
TCRALNAL

SEQ ID NO: 4674 - protein, 9 aa, Artificial Sequence
  Representative cyclic modulating agent based on Desmoglein-3 cell adhesion recognition sequence
TCRALNAQG

SEQ ID NO: 4675 - protein, 9 aa, Artificial Sequence
  Representative cyclic modulating agent based on Desmoglein-3 cell adhesion recognition sequence
TCRALNALG

SEQ ID NO: 4676 - protein, 6 aa, Artificial Sequence
  Representative cyclic modulating agent based on Desmoglein-3 cell adhesion recognition sequence
ITCRAL

SEQ ID NO: 4677 - protein, 7 aa, Artificial Sequence
  Representative cyclic modulating agent based on Desmoglein-3 cell adhesion recognition sequence
ITCRALN

SEQ ID NO: 4678 - protein, 8 aa, Artificial Sequence
  Representative cyclic modulating agent based on Desmoglein-3 cell adhesion recognition sequence
ITCRALNA

SEQ ID NO: 4679 - protein, 9 aa, Artificial Sequence
  Representative cyclic modulating agent based on Desmoglein-3 cell adhesion recognition sequence
ITCRALNAQ

SEQ ID NO: 4680 - protein, 9 aa, Artificial Sequence
  Representative cyclic modulating agent based on Desmoglein-3 cell adhesion recognition sequence
ITCRALNAL

SEQ ID NO: 4681 - protein, 10 aa, Artificial Sequence
  Representative cyclic modulating agent based on Desmoglein-3 cell adhesion recognition sequence
ITCRALNAQG

SEQ ID NO: 4682 - protein, 10 aa, Artificial Sequence
  Representative cyclic modulating agent based on Desmoglein-3 cell adhesion recognition sequence
ITCRALNALG

SEQ ID NO: 4683 - protein, 5 aa, Artificial Sequence
  Representative cyclic modulating agent based on desmocollin-1 cell adhesion recognition sequence
CYATC

SEQ ID NO: 4684 - protein, 6 aa, Artificial Sequence
  Representative cyclic modulating agent based on desmocollin-1 cell adhesion recognition sequence
CYATTC

SEQ ID NO: 4685 - protein, 7 aa, Artificial Sequence
  Representative cyclic modulating agent based on desmocollin-1 cell adhesion recognition sequence
CYATTAC

SEQ ID NO: 4686 - protein, 8 aa, Artificial Sequence
  Representative cyclic modulating agent based on desmocollin-1 cell adhesion recognition sequence
CYATTADC

SEQ ID NO: 4687 - protein, 9 aa, Artificial Sequence
  Representative cyclic modulating agent based on desmocollin-1 cell adhesion recognition sequence
CYATTADGC

SEQ ID NO: 4688 - protein, 6 aa, Artificial Sequence
  Representative cyclic modulating agent based on desmocollin-1 cell adhesion recognition sequence
CGYATC

SEQ ID NO: 4689 - protein, 7 aa, Artificial Sequence
  Representative cyclic modulating agent based on desmocollin-1 cell adhesion recognition sequence
CGYATTC

SEQ ID NO: 4690 - protein, 8 aa, Artificial Sequence
  Representative cyclic modulating agent based on desmocollin-1 cell adhesion recognition sequence
CGYATTAC

SEQ ID NO: 4691 - protein, 9 aa, Artificial Sequence
  Representative cyclic modulating agent based on desmocollin-1 cell adhesion recognition sequence
CGYATTADC

SEQ ID NO: 4692 - protein, 10 aa, Artificial Sequence
  Representative cyclic modulating agent based on desmocollin-1 cell adhesion recognition sequence
CGYATTADGC

SEQ ID NO: 4693 - protein, 6 aa, Artificial Sequence
  Representative cyclic modulating agent based on desmocollin-1 cell adhesion recognition sequence
CAYATC

SEQ ID NO: 4694 - protein, 7 aa, Artificial Sequence
  Representative cyclic modulating agent based on desmocollin-1 cell adhesion recognition sequence
CAYATTC

SEQ ID NO: 4695 - protein, 8 aa, Artificial Sequence
  Representative cyclic modulating agent based on desmocollin-1 cell adhesion recognition sequence
CAYATTAC

SEQ ID NO: 4696 - protein, 9 aa, Artificial Sequence
  Representative cyclic modulating agent based on desmocollin-1 cell adhesion recognition sequence
CAYATTADC

SEQ ID NO: 4697 - protein, 10 aa, Artificial Sequence
  Representative cyclic modulating agent based on desmocollin-1 cell adhesion recognition sequence
CAYATTADGC

SEQ ID NO: 4698 - protein, 7 aa, Artificial Sequence
  Representative cyclic modulating agent based on desmocollin-1 cell adhesion recognition sequence
CYGYATC

SEQ ID NO: 4699 - protein, 8 aa, Artificial Sequence
  Representative cyclic modulating agent based on desmocollin-1 cell adhesion recognition sequence
CYGYATTC

SEQ ID NO: 4700 - protein, 9 aa, Artificial Sequence
  Representative cyclic modulating agent based on desmocollin-1 cell adhesion recognition sequence
CYGYATTAC

SEQ ID NO: 4701 - protein, 10 aa, Artificial Sequence
  Representative cyclic modulating agent based on desmocollin-1 cell adhesion recognition sequence
CYGYATTADC

SEQ ID NO: 4702 - protein, 11 aa, Artificial Sequence
  Representative cyclic modulating agent based on desmocollin-1 cell adhesion recognition sequence
CYGYATTADGC

SEQ ID NO: 4703 - protein, 7 aa, Artificial Sequence
  Representative cyclic modulating agent based on desmocollin-1 cell adhesion recognition sequence
CYAYATC

SEQ ID NO: 4704 - protein, 8 aa, Artificial Sequence
  Representative cyclic modulating agent based on desmocollin-1 cell adhesion recognition sequence
CYAYATTC

SEQ ID NO: 4705 - protein, 9 aa, Artificial Sequence
  Representative cyclic modulating agent based on desmocollin-1 cell adhesion recognition sequence
CYAYATTAC

SEQ ID NO: 4706 - protein, 10 aa, Artificial Sequence
  Representative cyclic modulating agent based on desmocollin-1 cell adhesion recognition sequence
CYAYATTADC

SEQ ID NO: 4707 - protein, 11 aa, Artificial Sequence
  Representative cyclic modulating agent based on desmocollin-1 cell adhesion recognition sequence
CYAYATTADGC

SEQ ID NO: 4708 - protein, 8 aa, Artificial Sequence
  Representative cyclic modulating agent based on desmocollin-1 cell adhesion recognition sequence
CLYGYATC

SEQ ID NO: 4709 - protein, 9 aa, Artificial Sequence
  Representative cyclic modulating agent based on desmocollin-1 cell adhesion recognition sequence
CLYGYATTC

SEQ ID NO: 4710 - protein, 10 aa, Artificial Sequence
  Representative cyclic modulating agent based on desmocollin-1 cell adhesion recognition sequence
CLYGYATTAC

SEQ ID NO: 4711 - protein, 11 aa, Artificial Sequence
  Representative cyclic modulating agent based on desmocollin-1 cell adhesion recognition sequence
CLYGYATTADC

SEQ ID NO: 4712 - protein, 12 aa, Artificial Sequence
  Representative cyclic modulating agent based on desmocollin-1 cell adhesion recognition sequence
CLYGYATTADGC

SEQ ID NO: 4713 - protein, 8 aa, Artificial Sequence
  Representative cyclic modulating agent based on desmocollin-1 cell adhesion recognition sequence
CLYAYATC

SEQ ID NO: 4714 - protein, 9 aa, Artificial Sequence
  Representative cyclic modulating agent based on desmocollin-1 cell adhesion recognition sequence
CLYAYATTC

SEQ ID NO: 4715 - protein, 10 aa, Artificial Sequence
  Representative cyclic modulating agent based on desmocollin-1 cell adhesion recognition sequence
CLYAYATTAC

SEQ ID NO: 4716 - protein, 11 aa, Artificial Sequence
  Representative cyclic modulating agent based on desmocollin-1 cell adhesion recognition sequence
CLYAYATTADC

SEQ ID NO: 4717 - protein, 12 aa, Artificial Sequence
  Representative cyclic modulating agent based on desmocollin-1 cell adhesion recognition sequence
CLYAYATTADGC

SEQ ID NO: 4718 - protein, 8 aa, Artificial Sequence
  Representative cyclic modulating agent based on desmocollin-1 cell adhesion recognition sequence
CVYGYATC

SEQ ID NO: 4719 - protein, 9 aa, Artificial Sequence
  Representative cyclic modulating agent based on desmocollin-1 cell adhesion recognition sequence
CVYGYATTC

SEQ ID NO: 4720 - protein, 10 aa, Artificial Sequence
  Representative cyclic modulating agent based on desmocollin-1 cell adhesion recognition sequence
CVYGYATTAC

SEQ ID NO: 4721 - protein, 11 aa, Artificial Sequence
  Representative cyclic modulating agent based on desmocollin-1 cell adhesion recognition sequence
CVYGYATTADC

SEQ ID NO: 4722 - protein, 12 aa, Artificial Sequence
  Representative cyclic modulating agent based on desmocollin-1 cell adhesion recognition sequence
CVYGYATTADGC

SEQ ID NO: 4723 - protein, 8 aa, Artificial Sequence
  Representative cyclic modulating agent based on desmocollin-1 cell adhesion recognition sequence
CVYAYATC

SEQ ID NO: 4724 - protein, 9 aa, Artificial Sequence
  Representative cyclic modulating agent based on desmocollin-1 cell adhesion recognition sequence
CVYAYATTC

SEQ ID NO: 4725 - protein, 10 aa, Artificial Sequence
  Representative cyclic modulating agent based on desmocollin-1 cell adhesion recognition sequence
CVYAYATTAC

SEQ ID NO: 4726 - protein, 11 aa, Artificial Sequence
  Representative cyclic modulating agent based on desmocollin-1 cell adhesion recognition sequence
CVYAYATTADC

SEQ ID NO: 4727 - protein, 12 aa, Artificial Sequence
  Representative cyclic modulating agent based on desmocollin-1 cell adhesion recognition sequence
CVYAYATTADGC

SEQ ID NO: 4728 - protein, 8 aa, Artificial Sequence
  Representative cyclic modulating agent based on desmocollin-1 cell adhesion recognition sequence
CIYGYATC

SEQ ID NO: 4729 - protein, 9 aa, Artificial Sequence
  Representative cyclic modulating agent based on desmocollin-1 cell adhesion recognition sequence
CIYGYATTC

SEQ ID NO: 4730 - protein, 10 aa, Artificial Sequence
  Representative cyclic modulating agent based on desmocollin-1 cell adhesion recognition sequence
CIYGYATTAC

SEQ ID NO: 4731 - protein, 11 aa, Artificial Sequence
  Representative cyclic modulating agent based on desmocollin-1 cell adhesion recognition sequence
CIYGYATTADC

SEQ ID NO: 4732 - protein, 12 aa, Artificial Sequence
  Representative cyclic modulating agent based on desmocollin-1 cell adhesion recognition sequence
CIYGYATTADGC

SEQ ID NO: 4733 - protein, 8 aa, Artificial Sequence
  Representative cyclic modulating agent based on desmocollin-1 cell adhesion recognition sequence
CIYAYATC

SEQ ID NO: 4734 - protein, 9 aa, Artificial Sequence
  Representative cyclic modulating agent based on desmocollin-1 cell adhesion recognition sequence
CIYAYATTC

SEQ ID NO: 4735 - protein, 10 aa, Artificial Sequence
  Representative cyclic modulating agent based on desmocollin-1 cell adhesion recognition sequence
CIYAYATTAC

SEQ ID NO: 4736 - protein, 11 aa, Artificial Sequence
  Representative cyclic modulating agent based on desmocollin-1 cell adhesion recognition sequence
CIYAYATTADC

SEQ ID NO: 4737 - protein, 12 aa, Artificial Sequence
  Representative cyclic modulating agent based on desmocollin-1 cell adhesion recognition sequence
CIYAYATTADGC

SEQ ID NO: 4738 - protein, 5 aa, Artificial Sequence
  Representative cyclic modulating agent based on desmocollin-1 cell adhesion recognition sequence
EYATK

SEQ ID NO: 4739 - protein, 6 aa, Artificial Sequence
  Representative cyclic modulating agent based on desmocollin-1 cell adhesion recognition sequence
EYATTK

SEQ ID NO: 4740 - protein, 7 aa, Artificial Sequence
  Representative cyclic modulating agent based on desmocollin-1 cell adhesion recognition sequence
EYATTAK

SEQ ID NO: 4741 - protein, 8 aa, Artificial Sequence
  Representative cyclic modulating agent based on desmocollin-1 cell adhesion recognition sequence
EYATTADK

SEQ ID NO: 4742 - protein, 9 aa, Artificial Sequence
  Representative cyclic modulating agent based on desmocollin-1 cell adhesion recognition sequence
EYATTADGK

SEQ ID NO: 4743 - protein, 6 aa, Artificial Sequence
  Representative cyclic modulating agent based on desmocollin-1 cell adhesion recognition sequence
EGYATK

SEQ ID NO: 4744 - protein, 7 aa, Artificial Sequence
  Representative cyclic modulating agent based on desmocollin-1 cell adhesion recognition sequence
EGYATTK

SEQ ID NO: 4745 - protein, 8 aa, Artificial Sequence
  Representative cyclic modulating agent based on desmocollin-1 cell adhesion recognition sequence
EGYATTAK

SEQ ID NO: 4746 - protein, 9 aa, Artificial Sequence
  Representative cyclic modulating agent based on desmocollin-1 cell adhesion recognition sequence
EGYATTADK

SEQ ID NO: 4747 - protein, 10 aa, Artificial Sequence
  Representative cyclic modulating agent based on desmocollin-1 cell adhesion recognition sequence
EGYATTADGK

SEQ ID NO: 4748 - protein, 6 aa, Artificial Sequence
  Representative cyclic modulating agent based on desmocollin-1 cell adhesion recognition sequence
EAYATK

SEQ ID NO: 4749 - protein, 7 aa, Artificial Sequence
  Representative cyclic modulating agent based on desmocollin-1 cell adhesion recognition sequence
EAYATTK

SEQ ID NO: 4750 - protein, 8 aa, Artificial Sequence
  Representative cyclic modulating agent based on desmocollin-1 cell adhesion recognition sequence
EAYATTAK

SEQ ID NO: 4751 - protein, 9 aa, Artificial Sequence
  Representative cyclic modulating agent based on desmocollin-1 cell adhesion recognition sequence
EAYATTADK

SEQ ID NO: 4752 - protein, 10 aa, Artificial Sequence
  Representative cyclic modulating agent based on desmocollin-1 cell adhesion recognition sequence
EAYATTADGK

SEQ ID NO: 4753 - protein, 7 aa, Artificial Sequence
  Representative cyclic modulating agent based on desmocollin-1 cell adhesion recognition sequence
EYGYATK

SEQ ID NO: 4754 - protein, 8 aa, Artificial Sequence
  Representative cyclic modulating agent based on desmocollin-1 cell adhesion recognition sequence
EYGYATTK

SEQ ID NO: 4755 - protein, 9 aa, Artificial Sequence
  Representative cyclic modulating agent based on desmocollin-1 cell adhesion recognition sequence
EYGYATTAK

SEQ ID NO: 4756 - protein, 10 aa, Artificial Sequence
  Representative cyclic modulating agent based on desmocollin-1 cell adhesion recognition sequence
EYGYATTADK

SEQ ID NO: 4757 - protein, 11 aa, Artificial Sequence
  Representative cyclic modulating agent based on desmocollin-1 cell adhesion recognition sequence
EYGYATTADGK

SEQ ID NO: 4758 - protein, 7 aa, Artificial Sequence
  Representative cyclic modulating agent based on desmocollin-1 cell adhesion recognition sequence
EYAYATK

SEQ ID NO: 4759 - protein, 8 aa, Artificial Sequence
  Representative cyclic modulating agent based on desmocollin-1 cell adhesion recognition sequence
EYAYATTK

SEQ ID NO: 4760 - protein, 9 aa, Artificial Sequence
  Representative cyclic modulating agent based on desmocollin-1 cell adhesion recognition sequence
EYAYATTAK

SEQ ID NO: 4761 - protein, 10 aa, Artificial Sequence
  Representative cyclic modulating agent based on desmocollin-1 cell adhesion recognition sequence
EYAYATTADK

SEQ ID NO: 4762 - protein, 11 aa, Artificial Sequence
  Representative cyclic modulating agent based on desmocollin-1 cell adhesion recognition sequence
EYAYATTADGK

SEQ ID NO: 4763 - protein, 8 aa, Artificial Sequence
  Representative cyclic modulating agent based on desmocollin-1 cell adhesion recognition sequence
ELYGYATK

SEQ ID NO: 4764 - protein, 9 aa, Artificial Sequence
  Representative cyclic modulating agent based on desmocollin-1 cell adhesion recognition sequence
ELYGYATTK

SEQ ID NO: 4765 - protein, 10 aa, Artificial Sequence
  Representative cyclic modulating agent based on desmocollin-1 cell adhesion recognition sequence
ELYGYATTAK

SEQ ID NO: 4766 - protein, 11 aa, Artificial Sequence
  Representative cyclic modulating agent based on desmocollin-1 cell adhesion recognition sequence
ELYGYATTADK

SEQ ID NO: 4767 - protein, 12 aa, Artificial Sequence
  Representative cyclic modulating agent based on desmocollin-1 cell adhesion recognition sequence
ELYGYATTADGK

SEQ ID NO: 4768 - protein, 8 aa, Artificial Sequence
  Representative cyclic modulating agent based on desmocollin-1 cell adhesion recognition sequence
ELYAYATK

SEQ ID NO: 4769 - protein, 9 aa, Artificial Sequence
  Representative cyclic modulating agent based on desmocollin-1 cell adhesion recognition sequence
ELYAYATTK

SEQ ID NO: 4770 - protein, 10 aa, Artificial Sequence
  Representative cyclic modulating agent based on desmocollin-1 cell adhesion recognition sequence
ELYAYATTAK

SEQ ID NO: 4771 - protein, 11 aa, Artificial Sequence
  Representative cyclic modulating agent based on desmocollin-1 cell adhesion recognition sequence
ELYAYATTADK

SEQ ID NO: 4772 - protein, 12 aa, Artificial Sequence
  Representative cyclic modulating agent based on desmocollin-1 cell adhesion recognition sequence
ELYAYATTADGK

SEQ ID NO: 4773 - protein, 8 aa, Artificial Sequence
  Representative cyclic modulating agent based on desmocollin-1 cell adhesion recognition sequence
EVYGYATK

SEQ ID NO: 4774 - protein, 9 aa, Artificial Sequence
  Representative cyclic modulating agent based on desmocollin-1 cell adhesion recognition sequence
EVYGYATTK

SEQ ID NO: 4775 - protein, 10 aa, Artificial Sequence
  Representative cyclic modulating agent based on desmocollin-1 cell adhesion recognition sequence
EVYGYATTAK

SEQ ID NO: 4776 - protein, 11 aa, Artificial Sequence
  Representative cyclic modulating agent based on desmocollin-1 cell adhesion recognition sequence
EVYGYATTADK

SEQ ID NO: 4777 - protein, 12 aa, Artificial Sequence
  Representative cyclic modulating agent based on desmocollin-1 cell adhesion recognition sequence
EVYGYATTADGK

SEQ ID NO: 4778 - protein, 8 aa, Artificial Sequence
  Representative cyclic modulating agent based on desmocollin-1 cell adhesion recognition sequence
EVYAYATK

SEQ ID NO: 4779 - protein, 9 aa, Artificial Sequence
  Representative cyclic modulating agent based on desmocollin-1 cell adhesion recognition sequence
EVYAYATTK

SEQ ID NO: 4780 - protein, 10 aa, Artificial Sequence
  Representative cyclic modulating agent based on desmocollin-1 cell adhesion recognition sequence
EVYAYATTAK

SEQ ID NO: 4781 - protein, 11 aa, Artificial Sequence
  Representative cyclic modulating agent based on desmocollin-1 cell adhesion recognition sequence
EVYAYATTADK

SEQ ID NO: 4782 - protein, 12 aa, Artificial Sequence
  Representative cyclic modulating agent based on desmocollin-1 cell adhesion recognition sequence
EVYAYATTADGK

SEQ ID NO: 4783 - protein, 8 aa, Artificial Sequence
  Representative cyclic modulating agent based on desmocollin-1 cell adhesion recognition sequence
EIYGYATK

SEQ ID NO: 4784 - protein, 9 aa, Artificial Sequence
  Representative cyclic modulating agent based on desmocollin-1 cell adhesion recognition sequence
EIYGYATTK

SEQ ID NO: 4785 - protein, 10 aa, Artificial Sequence
  Representative cyclic modulating agent based on desmocollin-1 cell adhesion recognition sequence
EIYGYATTAK

SEQ ID NO: 4786 - protein, 11 aa, Artificial Sequence
  Representative cyclic modulating agent based on desmocollin-1 cell adhesion recognition sequence
EIYGYATTADK

SEQ ID NO: 4787 - protein, 12 aa, Artificial Sequence
  Representative cyclic modulating agent based on desmocollin-1 cell adhesion recognition sequence
EIYGYATTADGK

SEQ ID NO: 4788 - protein, 8 aa, Artificial Sequence
  Representative cyclic modulating agent based on desmocollin-1 cell adhesion recognition sequence
EIYAYATK

SEQ ID NO: 4789 - protein, 9 aa, Artificial Sequence
  Representative cyclic modulating agent based on desmocollin-1 cell adhesion recognition sequence
EIYAYATTK

SEQ ID NO: 4790 - protein, 10 aa, Artificial Sequence
  Representative cyclic modulating agent based on desmocollin-1 cell adhesion recognition sequence
EIYAYATTAK

SEQ ID NO: 4791 - protein, 11 aa, Artificial Sequence
  Representative cyclic modulating agent based on desmocollin-1 cell adhesion recognition sequence
EIYAYATTADK

SEQ ID NO: 4792 - protein, 12 aa, Artificial Sequence
  Representative cyclic modulating agent based on desmocollin-1 cell adhesion recognition sequence
EIYAYATTADGK

SEQ ID NO: 4793 - protein, 5 aa, Artificial Sequence
  Representative cyclic modulating agent based on desmocollin-1 cell adhesion recognition sequence
KYATE

SEQ ID NO: 4794 - protein, 6 aa, Artificial Sequence
  Representative cyclic modulating agent based on desmocollin-1 cell adhesion recognition sequence
KYATTE

SEQ ID NO: 4795 - protein, 7 aa, Artificial Sequence
  Representative cyclic modulating agent based on desmocollin-1 cell adhesion recognition sequence
KYATTAE

SEQ ID NO: 4796 - protein, 8 aa, Artificial Sequence
  Representative cyclic modulating agent based on desmocollin-1 cell adhesion recognition sequence
KYATTADE

SEQ ID NO: 4797 - protein, 9 aa, Artificial Sequence
  Representative cyclic modulating agent based on desmocollin-1 cell adhesion recognition sequence
KYATTADGE

SEQ ID NO: 4798 - protein, 6 aa, Artificial Sequence
  Representative cyclic modulating agent based on desmocollin-1 cell adhesion recognition sequence
KGYATE

SEQ ID NO: 4799 - protein, 7 aa, Artificial Sequence
  Representative cyclic modulating agent based on desmocollin-1 cell adhesion recognition sequence
KGYATTE

SEQ ID NO: 4800 - protein, 8 aa, Artificial Sequence
  Representative cyclic modulating agent based on desmocollin-1 cell adhesion recognition sequence
KGYATTAE

SEQ ID NO: 4801 - protein, 9 aa, Artificial Sequence
  Representative cyclic modulating agent based on desmocollin-1 cell adhesion recognition sequence
KGYATTADE

SEQ ID NO: 4802 - protein, 10 aa, Artificial Sequence
  Representative cyclic modulating agent based on desmocollin-1 cell adhesion recognition sequence
KGYATTADGE

SEQ ID NO: 4803 - protein, 6 aa, Artificial Sequence
  Representative cyclic modulating agent based on desmocollin-1 cell adhesion recognition sequence
KAYATE

SEQ ID NO: 4804 - protein, 7 aa, Artificial Sequence
  Representative cyclic modulating agent based on desmocollin-1 cell adhesion recognition sequence
KAYATTE

SEQ ID NO: 4805 - protein, 8 aa, Artificial Sequence
  Representative cyclic modulating agent based on desmocollin-1 cell adhesion recognition sequence
KAYATTAE

SEQ ID NO: 4806 - protein, 9 aa, Artificial Sequence
  Representative cyclic modulating agent based on desmocollin-1 cell adhesion recognition sequence
KAYATTADE

SEQ ID NO: 4807 - protein, 10 aa, Artificial Sequence
  Representative cyclic modulating agent based on desmocollin-1 cell adhesion recognition sequence
KAYATTADGE

SEQ ID NO: 4808 - protein, 7 aa, Artificial Sequence
  Representative cyclic modulating agent based on desmocollin-1 cell adhesion recognition sequence
KYGYATE

SEQ ID NO: 4809 - protein, 8 aa, Artificial Sequence
  Representative cyclic modulating agent based on desmocollin-1 cell adhesion recognition sequence
KYGYATTE

SEQ ID NO: 4810 - protein, 9 aa, Artificial Sequence
  Representative cyclic modulating agent based on desmocollin-1 cell adhesion recognition sequence
KYGYATTAE

SEQ ID NO: 4811 - protein, 10 aa, Artificial Sequence
  Representative cyclic modulating agent based on desmocollin-1 cell adhesion recognition sequence
KYGYATTADE

SEQ ID NO: 4812 - protein, 11 aa, Artificial Sequence
  Representative cyclic modulating agent based on desmocollin-1 cell adhesion recognition sequence
KYGYATTADGE

SEQ ID NO: 4813 - protein, 7 aa, Artificial Sequence
  Representative cyclic modulating agent based on desmocollin-1 cell adhesion recognition sequence
KYAYATE

SEQ ID NO: 4814 - protein, 8 aa, Artificial Sequence
  Representative cyclic modulating agent based on desmocollin-1 cell adhesion recognition sequence
KYAYATTE

SEQ ID NO: 4815 - protein, 9 aa, Artificial Sequence
  Representative cyclic modulating agent based on desmocollin-1 cell adhesion recognition sequence
KYAYATTAE

SEQ ID NO: 4816 - protein, 10 aa, Artificial Sequence
  Representative cyclic modulating agent based on desmocollin-1 cell adhesion recognition sequence
KYAYATTADE

SEQ ID NO: 4817 - protein, 11 aa, Artificial Sequence
  Representative cyclic modulating agent based on desmocollin-1 cell adhesion recognition sequence
KYAYATTADGE

SEQ ID NO: 4818 - protein, 8 aa, Artificial Sequence
  Representative cyclic modulating agent based on desmocollin-1 cell adhesion recognition sequence
KLYGYATE

SEQ ID NO: 4819 - protein, 9 aa, Artificial Sequence
  Representative cyclic modulating agent based on desmocollin-1 cell adhesion recognition sequence
KLYGYATTE

SEQ ID NO: 4820 - protein, 10 aa, Artificial Sequence
  Representative cyclic modulating agent based on desmocollin-1 cell adhesion recognition sequence
KLYGYATTAE

SEQ ID NO: 4821 - protein, 11 aa, Artificial Sequence
  Representative cyclic modulating agent based on desmocollin-1 cell adhesion recognition sequence
KLYGYATTADE

SEQ ID NO: 4822 - protein, 12 aa, Artificial Sequence
  Representative cyclic modulating agent based on desmocollin-1 cell adhesion recognition sequence
KLYGYATTADGE

SEQ ID NO: 4823 - protein, 8 aa, Artificial Sequence
  Representative cyclic modulating agent based on desmocollin-1 cell adhesion recognition sequence
KLYAYATE

SEQ ID NO: 4824 - protein, 9 aa, Artificial Sequence
  Representative cyclic modulating agent based on desmocollin-1 cell adhesion recognition sequence
KLYAYATTE

SEQ ID NO: 4825 - protein, 10 aa, Artificial Sequence
  Representative cyclic modulating agent based on desmocollin-1 cell adhesion recognition sequence
KLYAYATTAE

SEQ ID NO: 4826 - protein, 11 aa, Artificial Sequence
  Representative cyclic modulating agent based on desmocollin-1 cell adhesion recognition sequence
KLYAYATTADE

SEQ ID NO: 4827 - protein, 12 aa, Artificial Sequence
  Representative cyclic modulating agent based on desmocollin-1 cell adhesion recognition sequence
KLYAYATTADGE

SEQ ID NO: 4828 - protein, 8 aa, Artificial Sequence
  Representative cyclic modulating agent based on desmocollin-1 cell adhesion recognition sequence
KVYGYATE

SEQ ID NO: 4829 - protein, 9 aa, Artificial Sequence
  Representative cyclic modulating agent based on desmocollin-1 cell adhesion recognition sequence
KVYGYATTE

SEQ ID NO: 4830 - protein, 10 aa, Artificial Sequence
  Representative cyclic modulating agent based on desmocollin-1 cell adhesion recognition sequence
KVYGYATTAE

SEQ ID NO: 4831 - protein, 11 aa, Artificial Sequence
  Representative cyclic modulating agent based on desmocollin-1 cell adhesion recognition sequence
KVYGYATTADE

SEQ ID NO: 4832 - protein, 12 aa, Artificial Sequence
  Representative cyclic modulating agent based on desmocollin-1 cell adhesion recognition sequence
KVYGYATTADGE

SEQ ID NO: 4833 - protein, 8 aa, Artificial Sequence
  Representative cyclic modulating agent based on desmocollin-1 cell adhesion recognition sequence
KVYAYATE

SEQ ID NO: 4834 - protein, 9 aa, Artificial Sequence
  Representative cyclic modulating agent based on desmocollin-1 cell adhesion recognition sequence
KVYAYATTE

SEQ ID NO: 4835 - protein, 10 aa, Artificial Sequence
  Representative cyclic modulating agent based on desmocollin-1 cell adhesion recognition sequence
KVYAYATTAE

SEQ ID NO: 4836 - protein, 11 aa, Artificial Sequence
  Representative cyclic modulating agent based on desmocollin-1 cell adhesion recognition sequence
KVYAYATTADE

SEQ ID NO: 4837 - protein, 12 aa, Artificial Sequence
  Representative cyclic modulating agent based on desmocollin-1 cell adhesion recognition sequence
KVYAYATTADGE

SEQ ID NO: 4838 - protein, 8 aa, Artificial Sequence
  Representative cyclic modulating agent based on desmocollin-1 cell adhesion recognition sequence
KIYGYATE

SEQ ID NO: 4839 - protein, 9 aa, Artificial Sequence
  Representative cyclic modulating agent based on desmocollin-1 cell adhesion recognition sequence
KIYGYATTE

SEQ ID NO: 4840 - protein, 10 aa, Artificial Sequence
  Representative cyclic modulating agent based on desmocollin-1 cell adhesion recognition sequence
KIYGYATTAE

SEQ ID NO: 4841 - protein, 11 aa, Artificial Sequence
  Representative cyclic modulating agent based on desmocollin-1 cell adhesion recognition sequence
KIYGYATTADE

SEQ ID NO: 4842 - protein, 12 aa, Artificial Sequence
  Representative cyclic modulating agent based on desmocollin-1 cell adhesion recognition sequence
KIYGYATTADGE

SEQ ID NO: 4843 - protein, 8 aa, Artificial Sequence
  Representative cyclic modulating agent based on desmocollin-1 cell adhesion recognition sequence
KIYAYATE

SEQ ID NO: 4844 - protein, 9 aa, Artificial Sequence
  Representative cyclic modulating agent based on desmocollin-1 cell adhesion recognition sequence
KIYAYATTE

SEQ ID NO: 4845 - protein, 10 aa, Artificial Sequence
  Representative cyclic modulating agent based on desmocollin-1 cell adhesion recognition sequence
KIYAYATTAE

SEQ ID NO: 4846 - protein, 11 aa, Artificial Sequence
  Representative cyclic modulating agent based on desmocollin-1 cell adhesion recognition sequence
KIYAYATTADE

SEQ ID NO: 4847 - protein, 12 aa, Artificial Sequence
  Representative cyclic modulating agent based on desmocollin-1 cell adhesion recognition sequence
KIYAYATTADGE

SEQ ID NO: 4848 - protein, 5 aa, Artificial Sequence
  Representative cyclic modulating agent based on desmocollin-1 cell adhesion recognition sequence
DYATK

SEQ ID NO: 4849 - protein, 6 aa, Artificial Sequence
  Representative cyclic modulating agent based on desmocollin-1 cell adhesion recognition sequence
DYATTK

SEQ ID NO: 4850 - protein, 7 aa, Artificial Sequence
  Representative cyclic modulating agent based on desmocollin-1 cell adhesion recognition sequence
DYATTAK

SEQ ID NO: 4851 - protein, 8 aa, Artificial Sequence
  Representative cyclic modulating agent based on desmocollin-1 cell adhesion recognition sequence
DYATTADK

SEQ ID NO: 4852 - protein, 9 aa, Artificial Sequence
  Representative cyclic modulating agent based on desmocollin-1 cell adhesion recognition sequence
DYATTADGK

SEQ ID NO: 4853 - protein, 6 aa, Artificial Sequence
  Representative cyclic modulating agent based on desmocollin-1 cell adhesion recognition sequence
DGYATK

SEQ ID NO: 4854 - protein, 7 aa, Artificial Sequence
  Representative cyclic modulating agent based on desmocollin-1 cell adhesion recognition sequence
DGYATTK

SEQ ID NO: 4855 - protein, 8 aa, Artificial Sequence
  Representative cyclic modulating agent based on desmocollin-1 cell adhesion recognition sequence
DGYATTAK

SEQ ID NO: 4856 - protein, 9 aa, Artificial Sequence
  Representative cyclic modulating agent based on desmocollin-1 cell adhesion recognition sequence
DGYATTADK

SEQ ID NO: 4857 - protein, 10 aa, Artificial Sequence
  Representative cyclic modulating agent based on desmocollin-1 cell adhesion recognition sequence
DGYATTADGK

SEQ ID NO: 4858 - protein, 6 aa, Artificial Sequence
  Representative cyclic modulating agent based on desmocollin-1 cell adhesion recognition sequence
DAYATK

SEQ ID NO: 4859 - protein, 7 aa, Artificial Sequence
  Representative cyclic modulating agent based on desmocollin-1 cell adhesion recognition sequence
DAYATTK

SEQ ID NO: 4860 - protein, 8 aa, Artificial Sequence
  Representative cyclic modulating agent based on desmocollin-1 cell adhesion recognition sequence
DAYATTAK

SEQ ID NO: 4861 - protein, 9 aa, Artificial Sequence
  Representative cyclic modulating agent based on desmocollin-1 cell adhesion recognition sequence
DAYATTADK

SEQ ID NO: 4862 - protein, 10 aa, Artificial Sequence
  Representative cyclic modulating agent based on desmocollin-1 cell adhesion recognition sequence
DAYATTADGK

SEQ ID NO: 4863 - protein, 7 aa, Artificial Sequence
  Representative cyclic modulating agent based on desmocollin-1 cell adhesion recognition sequence
DYGYATK

SEQ ID NO: 4864 - protein, 8 aa, Artificial Sequence
  Representative cyclic modulating agent based on desmocollin-1 cell adhesion recognition sequence
DYGYATTK

SEQ ID NO: 4865 - protein, 9 aa, Artificial Sequence
  Representative cyclic modulating agent based on desmocollin-1 cell adhesion recognition sequence
DYGYATTAK

SEQ ID NO: 4866 - protein, 10 aa, Artificial Sequence
  Representative cyclic modulating agent based on desmocollin-1 cell adhesion recognition sequence
DYGYATTADK

SEQ ID NO: 4867 - protein, 11 aa, Artificial Sequence
  Representative cyclic modulating agent based on desmocollin-1 cell adhesion recognition sequence
DYGYATTADGK

SEQ ID NO: 4868 - protein, 7 aa, Artificial Sequence
  Representative cyclic modulating agent based on desmocollin-1 cell adhesion recognition sequence
DYAYATK

SEQ ID NO: 4869 - protein, 8 aa, Artificial Sequence
  Representative cyclic modulating agent based on desmocollin-1 cell adhesion recognition sequence
DYAYATTK

SEQ ID NO: 4870 - protein, 9 aa, Artificial Sequence
  Representative cyclic modulating agent based on desmocollin-1 cell adhesion recognition sequence
DYAYATTAK

SEQ ID NO: 4871 - protein, 10 aa, Artificial Sequence
  Representative cyclic modulating agent based on desmocollin-1 cell adhesion recognition sequence
DYAYATTADK

SEQ ID NO: 4872 - protein, 11 aa, Artificial Sequence
  Representative cyclic modulating agent based on desmocollin-1 cell adhesion recognition sequence
DYAYATTADGK

SEQ ID NO: 4873 - protein, 8 aa, Artificial Sequence
  Representative cyclic modulating agent based on desmocollin-1 cell adhesion recognition sequence
DLYGYATK

SEQ ID NO: 4874 - protein, 9 aa, Artificial Sequence
  Representative cyclic modulating agent based on desmocollin-1 cell adhesion recognition sequence
DLYGYATTK

SEQ ID NO: 4875 - protein, 10 aa, Artificial Sequence
  Representative cyclic modulating agent based on desmocollin-1 cell adhesion recognition sequence
DLYGYATTAK

SEQ ID NO: 4876 - protein, 11 aa, Artificial Sequence
  Representative cyclic modulating agent based on desmocollin-1 cell adhesion recognition sequence
DLYGYATTADK

SEQ ID NO: 4877 - protein, 12 aa, Artificial Sequence
  Representative cyclic modulating agent based on desmocollin-1 cell adhesion recognition sequence
DLYGYATTADGK

SEQ ID NO: 4878 - protein, 8 aa, Artificial Sequence
  Representative cyclic modulating agent based on desmocollin-1 cell adhesion recognition sequence
DLYAYATK

SEQ ID NO: 4879 - protein, 9 aa, Artificial Sequence
  Representative cyclic modulating agent based on desmocollin-1 cell adhesion recognition sequence
DLYAYATTK

SEQ ID NO: 4880 - protein, 10 aa, Artificial Sequence
  Representative cyclic modulating agent based on desmocollin-1 cell adhesion recognition sequence
DLYAYATTAK

SEQ ID NO: 4881 - protein, 11 aa, Artificial Sequence
  Representative cyclic modulating agent based on desmocollin-1 cell adhesion recognition sequence
DLYAYATTADK

SEQ ID NO: 4882 - protein, 12 aa, Artificial Sequence
  Representative cyclic modulating agent based on desmocollin-1 cell adhesion recognition sequence
DLYAYATTADGK

SEQ ID NO: 4883 - protein, 8 aa, Artificial Sequence
  Representative cyclic modulating agent based on desmocollin-1 cell adhesion recognition sequence
DVYGYATK

SEQ ID NO: 4884 - protein, 9 aa, Artificial Sequence
  Representative cyclic modulating agent based on desmocollin-1 cell adhesion recognition sequence
DVYGYATTK

SEQ ID NO: 4885 - protein, 10 aa, Artificial Sequence
  Representative cyclic modulating agent based on desmocollin-1 cell adhesion recognition sequence
DVYGYATTAK

SEQ ID NO: 4886 - protein, 11 aa, Artificial Sequence
  Representative cyclic modulating agent based on desmocollin-1 cell adhesion recognition sequence
DVYGYATTADK

SEQ ID NO: 4887 - protein, 12 aa, Artificial Sequence
  Representative cyclic modulating agent based on desmocollin-1 cell adhesion recognition sequence
DVYGYATTADGK

SEQ ID NO: 4888 - protein, 8 aa, Artificial Sequence
  Representative cyclic modulating agent based on desmocollin-1 cell adhesion recognition sequence
DVYAYATK

SEQ ID NO: 4889 - protein, 9 aa, Artificial Sequence
  Representative cyclic modulating agent based on desmocollin-1 cell adhesion recognition sequence
DVYAYATTK

SEQ ID NO: 4890 - protein, 10 aa, Artificial Sequence
  Representative cyclic modulating agent based on desmocollin-1 cell adhesion recognition sequence
DVYAYATTAK

SEQ ID NO: 4891 - protein, 11 aa, Artificial Sequence
  Representative cyclic modulating agent based on desmocollin-1 cell adhesion recognition sequence
DVYAYATTADK

SEQ ID NO: 4892 - protein, 12 aa, Artificial Sequence
  Representative cyclic modulating agent based on desmocollin-1 cell adhesion recognition sequence
DVYAYATTADGK

SEQ ID NO: 4893 - protein, 8 aa, Artificial Sequence
  Representative cyclic modulating agent based on desmocollin-1 cell adhesion recognition sequence
DIYGYATK

SEQ ID NO: 4894 - protein, 9 aa, Artificial Sequence
  Representative cyclic modulating agent based on desmocollin-1 cell adhesion recognition sequence
DIYGYATTK

SEQ ID NO: 4895 - protein, 10 aa, Artificial Sequence
  Representative cyclic modulating agent based on desmocollin-1 cell adhesion recognition sequence
DIYGYATTAK

SEQ ID NO: 4896 - protein, 11 aa, Artificial Sequence
  Representative cyclic modulating agent based on desmocollin-1 cell adhesion recognition sequence
DIYGYATTADK

SEQ ID NO: 4897 - protein, 12 aa, Artificial Sequence
  Representative cyclic modulating agent based on desmocollin-1 cell adhesion recognition sequence
DIYGYATTADGK

SEQ ID NO: 4898 - protein, 8 aa, Artificial Sequence
  Representative cyclic modulating agent based on desmocollin-1 cell adhesion recognition sequence
DIYAYATK

SEQ ID NO: 4899 - protein, 9 aa, Artificial Sequence
  Representative cyclic modulating agent based on desmocollin-1 cell adhesion recognition sequence
DIYAYATTK

SEQ ID NO: 4900 - protein, 10 aa, Artificial Sequence
  Representative cyclic modulating agent based on desmocollin-1 cell adhesion recognition sequence
DIYAYATTAK

SEQ ID NO: 4901 - protein, 11 aa, Artificial Sequence
  Representative cyclic modulating agent based on desmocollin-1 cell adhesion recognition sequence
DIYAYATTADK

SEQ ID NO: 4902 - protein, 12 aa, Artificial Sequence
  Representative cyclic modulating agent based on desmocollin-1 cell adhesion recognition sequence
DIYAYATTADGK

SEQ ID NO: 4903 - protein, 5 aa, Artificial Sequence
  Representative cyclic modulating agent based on desmocollin-1 cell adhesion recognition sequence
KYATD

SEQ ID NO: 4904 - protein, 6 aa, Artificial Sequence
  Representative cyclic modulating agent based on desmocollin-1 cell adhesion recognition sequence
KYATTD

SEQ ID NO: 4905 - protein, 7 aa, Artificial Sequence
  Representative cyclic modulating agent based on desmocollin-1 cell adhesion recognition sequence
KYATTAD

SEQ ID NO: 4906 - protein, 8 aa, Artificial Sequence
  Representative cyclic modulating agent based on desmocollin-1 cell adhesion recognition sequence
KYATTADD

SEQ ID NO: 4907 - protein, 9 aa, Artificial Sequence
  Representative cyclic modulating agent based on desmocollin-1 cell adhesion recognition sequence
KYATTADGD

SEQ ID NO: 4908 - protein, 6 aa, Artificial Sequence
  Representative cyclic modulating agent based on desmocollin-1 cell adhesion recognition sequence
KGYATD

SEQ ID NO: 4909 - protein, 7 aa, Artificial Sequence
  Representative cyclic modulating agent based on desmocollin-1 cell adhesion recognition sequence
KGYATTD

SEQ ID NO: 4910 - protein, 8 aa, Artificial Sequence
  Representative cyclic modulating agent based on desmocollin-1 cell adhesion recognition sequence
KGYATTAD

SEQ ID NO: 4911 - protein, 9 aa, Artificial Sequence
  Representative cyclic modulating agent based on desmocollin-1 cell adhesion recognition sequence
KGYATTADD

SEQ ID NO: 4912 - protein, 10 aa, Artificial Sequence
  Representative cyclic modulating agent based on desmocollin-1 cell adhesion recognition sequence
KGYATTADGD

SEQ ID NO: 4913 - protein, 6 aa, Artificial Sequence
  Representative cyclic modulating agent based on desmocollin-1 cell adhesion recognition sequence
KAYATD

SEQ ID NO: 4914 - protein, 7 aa, Artificial Sequence
  Representative cyclic modulating agent based on desmocollin-1 cell adhesion recognition sequence
KAYATTD

SEQ ID NO: 4915 - protein, 8 aa, Artificial Sequence
  Representative cyclic modulating agent based on desmocollin-1 cell adhesion recognition sequence
KAYATTAD

SEQ ID NO: 4916 - protein, 9 aa, Artificial Sequence
  Representative cyclic modulating agent based on desmocollin-1 cell adhesion recognition sequence
KAYATTADD

SEQ ID NO: 4917 - protein, 10 aa, Artificial Sequence
  Representative cyclic modulating agent based on desmocollin-1 cell adhesion recognition sequence
KAYATTADGD

SEQ ID NO: 4918 - protein, 7 aa, Artificial Sequence
  Representative cyclic modulating agent based on desmocollin-1 cell adhesion recognition sequence
KYGYATD

SEQ ID NO: 4919 - protein, 8 aa, Artificial Sequence
  Representative cyclic modulating agent based on desmocollin-1 cell adhesion recognition sequence
KYGYATTD

SEQ ID NO: 4920 - protein, 9 aa, Artificial Sequence
  Representative cyclic modulating agent based on desmocollin-1 cell adhesion recognition sequence
KYGYATTAD

SEQ ID NO: 4921 - protein, 10 aa, Artificial Sequence
  Representative cyclic modulating agent based on desmocollin-1 cell adhesion recognition sequence
KYGYATTADD

SEQ ID NO: 4922 - protein, 11 aa, Artificial Sequence
  Representative cyclic modulating agent based on desmocollin-1 cell adhesion recognition sequence
KYGYATTADGD

SEQ ID NO: 4923 - protein, 7 aa, Artificial Sequence
  Representative cyclic modulating agent based on desmocollin-1 cell adhesion recognition sequence
KYAYATD

SEQ ID NO: 4924 - protein, 8 aa, Artificial Sequence
  Representative cyclic modulating agent based on desmocollin-1 cell adhesion recognition sequence
KYAYATTD

SEQ ID NO: 4925 - protein, 9 aa, Artificial Sequence
  Representative cyclic modulating agent based on desmocollin-1 cell adhesion recognition sequence
KYAYATTAD

SEQ ID NO: 4926 - protein, 10 aa, Artificial Sequence
  Representative cyclic modulating agent based on desmocollin-1 cell adhesion recognition sequence
KYAYATTADD

SEQ ID NO: 4927 - protein, 11 aa, Artificial Sequence
  Representative cyclic modulating agent based on desmocollin-1 cell adhesion recognition sequence
KYAYATTADGD

SEQ ID NO: 4928 - protein, 8 aa, Artificial Sequence
  Representative cyclic modulating agent based on desmocollin-1 cell adhesion recognition sequence
KLYGYATD

SEQ ID NO: 4929 - protein, 9 aa, Artificial Sequence
  Representative cyclic modulating agent based on desmocollin-1 cell adhesion recognition sequence
KLYGYATTD

SEQ ID NO: 4930 - protein, 10 aa, Artificial Sequence
  Representative cyclic modulating agent based on desmocollin-1 cell adhesion recognition sequence
KLYGYATTAD

SEQ ID NO: 4931 - protein, 11 aa, Artificial Sequence
  Representative cyclic modulating agent based on desmocollin-1 cell adhesion recognition sequence
KLYGYATTADD

SEQ ID NO: 4932 - protein, 12 aa, Artificial Sequence
  Representative cyclic modulating agent based on desmocollin-1 cell adhesion recognition sequence
KLYGYATTADGD

SEQ ID NO: 4933 - protein, 8 aa, Artificial Sequence
  Representative cyclic modulating agent based on desmocollin-1 cell adhesion recognition sequence
KLYAYATD

SEQ ID NO: 4934 - protein, 9 aa, Artificial Sequence
  Representative cyclic modulating agent based on desmocollin-1 cell adhesion recognition sequence
KLYAYATTD

SEQ ID NO: 4935 - protein, 10 aa, Artificial Sequence
  Representative cyclic modulating agent based on desmocollin-1 cell adhesion recognition sequence
KLYAYATTAD

SEQ ID NO: 4936 - protein, 11 aa, Artificial Sequence
  Representative cyclic modulating agent based on desmocollin-1 cell adhesion recognition sequence
KLYAYATTADD

SEQ ID NO: 4937 - protein, 12 aa, Artificial Sequence
  Representative cyclic modulating agent based on desmocollin-1 cell adhesion recognition sequence
KLYAYATTADGD

SEQ ID NO: 4938 - protein, 8 aa, Artificial Sequence
  Representative cyclic modulating agent based on desmocollin-1 cell adhesion recognition sequence
KVYGYATD

SEQ ID NO: 4939 - protein, 9 aa, Artificial Sequence
  Representative cyclic modulating agent based on desmocollin-1 cell adhesion recognition sequence
KVYGYATTD

SEQ ID NO: 4940 - protein, 10 aa, Artificial Sequence
  Representative cyclic modulating agent based on desmocollin-1 cell adhesion recognition sequence
KVYGYATTAD

SEQ ID NO: 4941 - protein, 11 aa, Artificial Sequence
  Representative cyclic modulating agent based on desmocollin-1 cell adhesion recognition sequence
KVYGYATTADD

SEQ ID NO: 4942 - protein, 12 aa, Artificial Sequence
  Representative cyclic modulating agent based on desmocollin-1 cell adhesion recognition sequence
KVYGYATTADGD

SEQ ID NO: 4943 - protein, 8 aa, Artificial Sequence
  Representative cyclic modulating agent based on desmocollin-1 cell adhesion recognition sequence
KVYAYATD

SEQ ID NO: 4944 - protein, 9 aa, Artificial Sequence
  Representative cyclic modulating agent based on desmocollin-1 cell adhesion recognition sequence
KVYAYATTD

SEQ ID NO: 4945 - protein, 10 aa, Artificial Sequence
  Representative cyclic modulating agent based on desmocollin-1 cell adhesion recognition sequence
KVYAYATTAD

SEQ ID NO: 4946 - protein, 11 aa, Artificial Sequence
  Representative cyclic modulating agent based on desmocollin-1 cell adhesion recognition sequence
KVYAYATTADD

SEQ ID NO: 4947 - protein, 12 aa, Artificial Sequence
  Representative cyclic modulating agent based on desmocollin-1 cell adhesion recognition sequence
KVYAYATTADGD

SEQ ID NO: 4948 - protein, 8 aa, Artificial Sequence
  Representative cyclic modulating agent based on desmocollin-1 cell adhesion recognition sequence
KIYGYATD

SEQ ID NO: 4949 - protein, 9 aa, Artificial Sequence
  Representative cyclic modulating agent based on desmocollin-1 cell adhesion recognition sequence
KIYGYATTD

SEQ ID NO: 4950 - protein, 10 aa, Artificial Sequence
  Representative cyclic modulating agent based on desmocollin-1 cell adhesion recognition sequence
KIYGYATTAD

SEQ ID NO: 4951 - protein, 11 aa, Artificial Sequence
  Representative cyclic modulating agent based on desmocollin-1 cell adhesion recognition sequence
KIYGYATTADD

SEQ ID NO: 4952 - protein, 12 aa, Artificial Sequence
  Representative cyclic modulating agent based on desmocollin-1 cell adhesion recognition sequence
KIYGYATTADGD

SEQ ID NO: 4953 - protein, 8 aa, Artificial Sequence
  Representative cyclic modulating agent based on desmocollin-1 cell adhesion recognition sequence
KIYAYATD

SEQ ID NO: 4954 - protein, 9 aa, Artificial Sequence
  Representative cyclic modulating agent based on desmocollin-1 cell adhesion recognition sequence
KIYAYATTD

SEQ ID NO: 4955 - protein, 10 aa, Artificial Sequence
  Representative cyclic modulating agent based on desmocollin-1 cell adhesion recognition sequence
KIYAYATTAD

SEQ ID NO: 4956 - protein, 11 aa, Artificial Sequence
  Representative cyclic modulating agent based on desmocollin-1 cell adhesion recognition sequence
KIYAYATTADD

SEQ ID NO: 4957 - protein, 12 aa, Artificial Sequence
  Representative cyclic modulating agent based on desmocollin-1 cell adhesion recognition sequence
KIYAYATTADGD

SEQ ID NO: 4958 - protein, 5 aa, Artificial Sequence
  Representative cyclic modulating agent based on desmocollin-1 cell adhesion recognition sequence
YATTA

SEQ ID NO: 4959 - protein, 6 aa, Artificial Sequence
  Representative cyclic modulating agent based on desmocollin-1 cell adhesion recognition sequence
YATTAD

SEQ ID NO: 4960 - protein, 7 aa, Artificial Sequence
  Representative cyclic modulating agent based on desmocollin-1 cell adhesion recognition sequence
YATTADG

SEQ ID NO: 4961 - protein, 5 aa, Artificial Sequence
  Representative cyclic modulating agent based on desmocollin-1 cell adhesion recognition sequence
GYATT

SEQ ID NO: 4962 - protein, 6 aa, Artificial Sequence
  Representative cyclic modulating agent based on desmocollin-1 cell adhesion recognition sequence
GYATTA

SEQ ID NO: 4963 - protein, 7 aa, Artificial Sequence
  Representative cyclic modulating agent based on desmocollin-1 cell adhesion recognition sequence
GYATTAD

SEQ ID NO: 4964 - protein, 8 aa, Artificial Sequence
  Representative cyclic modulating agent based on desmocollin-1 cell adhesion recognition sequence
GYATTADG

SEQ ID NO: 4965 - protein, 5 aa, Artificial Sequence
  Representative cyclic modulating agent based on desmocollin-1 cell adhesion recognition sequence
AYATT

SEQ ID NO: 4966 - protein, 6 aa, Artificial Sequence
  Representative cyclic modulating agent based on desmocollin-1 cell adhesion recognition sequence
AYATTA

SEQ ID NO: 4967 - protein, 7 aa, Artificial Sequence
  Representative cyclic modulating agent based on desmocollin-1 cell adhesion recognition sequence
AYATTAD

SEQ ID NO: 4968 - protein, 8 aa, Artificial Sequence
  Representative cyclic modulating agent based on desmocollin-1 cell adhesion recognition sequence
AYATTADG

SEQ ID NO: 4969 - protein, 5 aa, Artificial Sequence
  Representative cyclic modulating agent based on desmocollin-1 cell adhesion recognition sequence
YGYAT

SEQ ID NO: 4970 - protein, 6 aa, Artificial Sequence
  Representative cyclic modulating agent based on desmocollin-1 cell adhesion recognition sequence
YGYATT

SEQ ID NO: 4971 - protein, 7 aa, Artificial Sequence
  Representative cyclic modulating agent based on desmocollin-1 cell adhesion recognition sequence
YGYATTA

SEQ ID NO: 4972 - protein, 8 aa, Artificial Sequence
  Representative cyclic modulating agent based on desmocollin-1 cell adhesion recognition sequence
YGYATTAD

SEQ ID NO: 4973 - protein, 9 aa, Artificial Sequence
  Representative cyclic modulating agent based on desmocollin-1 cell adhesion recognition sequence
YGYATTADG

SEQ ID NO: 4974 - protein, 5 aa, Artificial Sequence
  Representative cyclic modulating agent based on desmocollin-1 cell adhesion recognition sequence
YAYAT

SEQ ID NO: 4975 - protein, 6 aa, Artificial Sequence
  Representative cyclic modulating agent based on desmocollin-1 cell adhesion recognition sequence
YAYATT

SEQ ID NO: 4976 - protein, 7 aa, Artificial Sequence
  Representative cyclic modulating agent based on desmocollin-1 cell adhesion recognition sequence
YAYATTA

SEQ ID NO: 4977 - protein, 8 aa, Artificial Sequence
  Representative cyclic modulating agent based on desmocollin-1 cell adhesion recognition sequence
YAYATTAD

SEQ ID NO: 4978 - protein, 9 aa, Artificial Sequence
  Representative cyclic modulating agent based on desmocollin-1 cell adhesion recognition sequence
YAYATTADG

SEQ ID NO: 4979 - protein, 6 aa, Artificial Sequence
  Representative cyclic modulating agent based on desmocollin-1 cell adhesion recognition sequence
LYGYAT

SEQ ID NO: 4980 - protein, 7 aa, Artificial Sequence
  Representative cyclic modulating agent based on desmocollin-1 cell adhesion recognition sequence
LYGYATT

SEQ ID NO: 4981 - protein, 8 aa, Artificial Sequence
  Representative cyclic modulating agent based on desmocollin-1 cell adhesion recognition sequence
LYGYATTA

SEQ ID NO: 4982 - protein, 9 aa, Artificial Sequence
  Representative cyclic modulating agent based on desmocollin-1 cell adhesion recognition sequence
LYGYATTAD

SEQ ID NO: 4983 - protein, 10 aa, Artificial Sequence
  Representative cyclic modulating agent based on desmocollin-1 cell adhesion recognition sequence
LYGYATTADG

SEQ ID NO: 4984 - protein, 6 aa, Artificial Sequence
  Representative cyclic modulating agent based on desmocollin-1 cell adhesion recognition sequence
LYAYAT

SEQ ID NO: 4985 - protein, 7 aa, Artificial Sequence
  Representative cyclic modulating agent based on desmocollin-1 cell adhesion recognition sequence
LYAYATT

SEQ ID NO: 4986 - protein, 8 aa, Artificial Sequence
  Representative cyclic modulating agent based on desmocollin-1 cell adhesion recognition sequence
LYAYATTA

SEQ ID NO: 4987 - protein, 9 aa, Artificial Sequence
  Representative cyclic modulating agent based on desmocollin-1 cell adhesion recognition sequence
LYAYATTAD

SEQ ID NO: 4988 - protein, 10 aa, Artificial Sequence
  Representative cyclic modulating agent based on desmocollin-1 cell adhesion recognition sequence
LYAYATTADG

SEQ ID NO: 4989 - protein, 6 aa, Artificial Sequence
  Representative cyclic modulating agent based on desmocollin-1 cell adhesion recognition sequence
VYGYAT

SEQ ID NO: 4990 - protein, 7 aa, Artificial Sequence
  Representative cyclic modulating agent based on desmocollin-1 cell adhesion recognition sequence
VYGYATT

SEQ ID NO: 4991 - protein, 8 aa, Artificial Sequence
  Representative cyclic modulating agent based on desmocollin-1 cell adhesion recognition sequence
VYGYATTA

SEQ ID NO: 4992 - protein, 9 aa, Artificial Sequence
  Representative cyclic modulating agent based on desmocollin-1 cell adhesion recognition sequence
VYGYATTAD

SEQ ID NO: 4993 - protein, 10 aa, Artificial Sequence
  Representative cyclic modulating agent based on desmocollin-1 cell adhesion recognition sequence
VYGYATTADG

SEQ ID NO: 4994 - protein, 6 aa, Artificial Sequence
  Representative cyclic modulating agent based on desmocollin-1 cell adhesion recognition sequence
VYAYAT

SEQ ID NO: 4995 - protein, 7 aa, Artificial Sequence
  Representative cyclic modulating agent based on desmocollin-1 cell adhesion recognition sequence
VYAYATT

SEQ ID NO: 4996 - protein, 8 aa, Artificial Sequence
  Representative cyclic modulating agent based on desmocollin-1 cell adhesion recognition sequence
VYAYATTA

SEQ ID NO: 4997 - protein, 9 aa, Artificial Sequence
  Representative cyclic modulating agent based on desmocollin-1 cell adhesion recognition sequence
VYAYATTAD

SEQ ID NO: 4998 - protein, 10 aa, Artificial Sequence
  Representative cyclic modulating agent based on desmocollin-1 cell adhesion recognition sequence
VYAYATTADG

SEQ ID NO: 4999 - protein, 6 aa, Artificial Sequence
  Representative cyclic modulating agent based on desmocollin-1 cell adhesion recognition sequence
IYGYAT

SEQ ID NO: 5000 - protein, 7 aa, Artificial Sequence
  Representative cyclic modulating agent based on desmocollin-1 cell adhesion recognition sequence
IYGYATT

SEQ ID NO: 5001 - protein, 8 aa, Artificial Sequence
  Representative cyclic modulating agent based on desmocollin-1 cell adhesion recognition sequence
IYGYATTA

SEQ ID NO: 5002 - protein, 9 aa, Artificial Sequence
  Representative cyclic modulating agent based on desmocollin-1 cell adhesion recognition sequence
IYGYATTAD

SEQ ID NO: 5003 - protein, 10 aa, Artificial Sequence
  Representative cyclic modulating agent based on desmocollin-1 cell adhesion recognition sequence
IYGYATTADG

SEQ ID NO: 5004 - protein, 6 aa, Artificial Sequence
  Representative cyclic modulating agent based on desmocollin-1 cell adhesion recognition sequence
IYAYAT

SEQ ID NO: 5005 - protein, 7 aa, Artificial Sequence
  Representative cyclic modulating agent based on desmocollin-1 cell adhesion recognition sequence
IYAYATT

SEQ ID NO: 5006 - protein, 8 aa, Artificial Sequence
  Representative cyclic modulating agent based on desmocollin-1 cell adhesion recognition sequence
IYAYATTA

SEQ ID NO: 5007 - protein, 9 aa, Artificial Sequence
  Representative cyclic modulating agent based on desmocollin-1 cell adhesion recognition sequence
IYAYATTAD

SEQ ID NO: 5008 - protein, 10 aa, Artificial Sequence
  Representative cyclic modulating agent based on desmocollin-1 cell adhesion recognition sequence
IYAYATTADG

SEQ ID NO: 5009 - protein, 5 aa, Artificial Sequence
  Representative cyclic modulating agent based on desmocollin-2 cell adhesion recognition sequence
CFATC

SEQ ID NO: 5010 - protein, 6 aa, Artificial Sequence
  Representative cyclic modulating agent based on desmocollin-2 cell adhesion recognition sequence
CFATTC

SEQ ID NO: 5011 - protein, 7 aa, Artificial Sequence
  Representative cyclic modulating agent based on desmocollin-2 cell adhesion recognition sequence
CFATTPC

SEQ ID NO: 5012 - protein, 8 aa, Artificial Sequence
  Representative cyclic modulating agent based on desmocollin-2 cell adhesion recognition sequence
CFATTPDC

SEQ ID NO: 5013 - protein, 9 aa, Artificial Sequence
  Representative cyclic modulating agent based on desmocollin-2 cell adhesion recognition sequence
CFATTPDGC

SEQ ID NO: 5014 - protein, 6 aa, Artificial Sequence
  Representative cyclic modulating agent based on desmocollin-2 cell adhesion recognition sequence
CAFATC

SEQ ID NO: 5015 - protein, 7 aa, Artificial Sequence
  Representative cyclic modulating agent based on desmocollin-2 cell adhesion recognition sequence
CAFATTC

SEQ ID NO: 5016 - protein, 8 aa, Artificial Sequence
  Representative cyclic modulating agent based on desmocollin-2 cell adhesion recognition sequence
CAFATTPC

SEQ ID NO: 5017 - protein, 9 aa, Artificial Sequence
  Representative cyclic modulating agent based on desmocollin-2 cell adhesion recognition sequence
CAFATTPDC

SEQ ID NO: 5018 - protein, 10 aa, Artificial Sequence
  Representative cyclic modulating agent based on desmocollin-2 cell adhesion recognition sequence
CAFATTPDGC

SEQ ID NO: 5019 - protein, 7 aa, Artificial Sequence
  Representative cyclic modulating agent based on desmocollin-2 cell adhesion recognition sequence
CIAFATC

SEQ ID NO: 5020 - protein, 8 aa, Artificial Sequence
  Representative cyclic modulating agent based on desmocollin-2 cell adhesion recognition sequence
CIAFATTC

SEQ ID NO: 5021 - protein, 9 aa, Artificial Sequence
  Representative cyclic modulating agent based on desmocollin-2 cell adhesion recognition sequence
CIAFATTPC

SEQ ID NO: 5022 - protein, 10 aa, Artificial Sequence
  Representative cyclic modulating agent based on desmocollin-2 cell adhesion recognition sequence
CIAFATTPDC

SEQ ID NO: 5023 - protein, 11 aa, Artificial Sequence
  Representative cyclic modulating agent based on desmocollin-2 cell adhesion recognition sequence
CIAFATTPDGC

SEQ ID NO: 5024 - protein, 8 aa, Artificial Sequence
  Representative cyclic modulating agent based on desmocollin-2 cell adhesion recognition sequence
CIIAFATC

SEQ ID NO: 5025 - protein, 9 aa, Artificial Sequence
  Representative cyclic modulating agent based on desmocollin-2 cell adhesion recognition sequence
CIIAFATTC

SEQ ID NO: 5026 - protein, 10 aa, Artificial Sequence
  Representative cyclic modulating agent based on desmocollin-2 cell adhesion recognition sequence
CIIAFATTPC

SEQ ID NO: 5027 - protein, 11 aa, Artificial Sequence
  Representative cyclic modulating agent based on desmocollin-2 cell adhesion recognition sequence
CIIAFATTPDC

SEQ ID NO: 5028 - protein, 12 aa, Artificial Sequence
  Representative cyclic modulating agent based on desmocollin-2 cell adhesion recognition sequence
CIIAFATTPDGC

SEQ ID NO: 5029 - protein, 8 aa, Artificial Sequence
  Representative cyclic modulating agent based on desmocollin-2 cell adhesion recognition sequence
CLIAFATC

SEQ ID NO: 5030 - protein, 9 aa, Artificial Sequence
  Representative cyclic modulating agent based on desmocollin-2 cell adhesion recognition sequence
CLIAFATTC

SEQ ID NO: 5031 - protein, 10 aa, Artificial Sequence
  Representative cyclic modulating agent based on desmocollin-2 cell adhesion recognition sequence
CLIAFATTPC

SEQ ID NO: 5032 - protein, 11 aa, Artificial Sequence
  Representative cyclic modulating agent based on desmocollin-2 cell adhesion recognition sequence
CLIAFATTPDC

SEQ ID NO: 5033 - protein, 12 aa, Artificial Sequence
  Representative cyclic modulating agent based on desmocollin-2 cell adhesion recognition sequence
CLIAFATTPDGC

SEQ ID NO: 5034 - protein, 5 aa, Artificial Sequence
  Representative cyclic modulating agent based on desmocollin-2 cell adhesion recognition sequence
EFATK

SEQ ID NO: 5035 - protein, 6 aa, Artificial Sequence
  Representative cyclic modulating agent based on desmocollin-2 cell adhesion recognition sequence
EFATTK

SEQ ID NO: 5036 - protein, 7 aa, Artificial Sequence
  Representative cyclic modulating agent based on desmocollin-2 cell adhesion recognition sequence
EFATTPK

SEQ ID NO: 5037 - protein, 8 aa, Artificial Sequence
  Representative cyclic modulating agent based on desmocollin-2 cell adhesion recognition sequence
EFATTPDK

SEQ ID NO: 5038 - protein, 9 aa, Artificial Sequence
  Representative cyclic modulating agent based on desmocollin-2 cell adhesion recognition sequence
EFATTPDGK

SEQ ID NO: 5039 - protein, 6 aa, Artificial Sequence
  Representative cyclic modulating agent based on desmocollin-2 cell adhesion recognition sequence
EAFATK

SEQ ID NO: 5040 - protein, 7 aa, Artificial Sequence
  Representative cyclic modulating agent based on desmocollin-2 cell adhesion recognition sequence
EAFATTK

SEQ ID NO: 5041 - protein, 8 aa, Artificial Sequence
  Representative cyclic modulating agent based on desmocollin-2 cell adhesion recognition sequence
EAFATTPK

SEQ ID NO: 5042 - protein, 9 aa, Artificial Sequence
  Representative cyclic modulating agent based on desmocollin-2 cell adhesion recognition sequence
EAFATTPDK

SEQ ID NO: 5043 - protein, 10 aa, Artificial Sequence
  Representative cyclic modulating agent based on desmocollin-2 cell adhesion recognition sequence
EAFATTPDGK

SEQ ID NO: 5044 - protein, 7 aa, Artificial Sequence
  Representative cyclic modulating agent based on desmocollin-2 cell adhesion recognition sequence
EIAFATK

SEQ ID NO: 5045 - protein, 8 aa, Artificial Sequence
  Representative cyclic modulating agent based on desmocollin-2 cell adhesion recognition sequence
EIAFATTK

SEQ ID NO: 5046 - protein, 9 aa, Artificial Sequence
  Representative cyclic modulating agent based on desmocollin-2 cell adhesion recognition sequence
EIAFATTPK

SEQ ID NO: 5047 - protein, 10 aa, Artificial Sequence
  Representative cyclic modulating agent based on desmocollin-2 cell adhesion recognition sequence
EIAFATTPDK

SEQ ID NO: 5048 - protein, 11 aa, Artificial Sequence
  Representative cyclic modulating agent based on desmocollin-2 cell adhesion recognition sequence
EIAFATTPDGK

SEQ ID NO: 5049 - protein, 8 aa, Artificial Sequence
  Representative cyclic modulating agent based on desmocollin-2 cell adhesion recognition sequence
EIIAFATK

SEQ ID NO: 5050 - protein, 9 aa, Artificial Sequence
  Representative cyclic modulating agent based on desmocollin-2 cell adhesion recognition sequence
EIIAFATTK

SEQ ID NO: 5051 - protein, 10 aa, Artificial Sequence
  Representative cyclic modulating agent based on desmocollin-2 cell adhesion recognition sequence
EIIAFATTPK

SEQ ID NO: 5052 - protein, 11 aa, Artificial Sequence
  Representative cyclic modulating agent based on desmocollin-2 cell adhesion recognition sequence
EIIAFATTPDK

SEQ ID NO: 5053 - protein, 12 aa, Artificial Sequence
  Representative cyclic modulating agent based on desmocollin-2 cell adhesion recognition sequence
EIIAFATTPDGK

SEQ ID NO: 5054 - protein, 8 aa, Artificial Sequence
  Representative cyclic modulating agent based on desmocollin-2 cell adhesion recognition sequence
ELIAFATK

SEQ ID NO: 5055 - protein, 9 aa, Artificial Sequence
  Representative cyclic modulating agent based on desmocollin-2 cell adhesion recognition sequence
ELIAFATTK

SEQ ID NO: 5056 - protein, 10 aa, Artificial Sequence
  Representative cyclic modulating agent based on desmocollin-2 cell adhesion recognition sequence
ELIAFATTPK

SEQ ID NO: 5057 - protein, 11 aa, Artificial Sequence
  Representative cyclic modulating agent based on desmocollin-2 cell adhesion recognition sequence
ELIAFATTPDK

SEQ ID NO: 5058 - protein, 12 aa, Artificial Sequence
  Representative cyclic modulating agent based on desmocollin-2 cell adhesion recognition sequence
ELIAFATTPDGK

SEQ ID NO: 5059 - protein, 5 aa, Artificial Sequence
  Representative cyclic modulating agent based on desmocollin-2 cell adhesion recognition sequence
KFATE

SEQ ID NO: 5060 - protein, 6 aa, Artificial Sequence
  Representative cyclic modulating agent based on desmocollin-2 cell adhesion recognition sequence
KFATTE

SEQ ID NO: 5061 - protein, 7 aa, Artificial Sequence
  Representative cyclic modulating agent based on desmocollin-2 cell adhesion recognition sequence
KFATTPE

SEQ ID NO: 5062 - protein, 8 aa, Artificial Sequence
  Representative cyclic modulating agent based on desmocollin-2 cell adhesion recognition sequence
KFATTPDE

SEQ ID NO: 5063 - protein, 9 aa, Artificial Sequence
  Representative cyclic modulating agent based on desmocollin-2 cell adhesion recognition sequence
KFATTPDGE

SEQ ID NO: 5064 - protein, 6 aa, Artificial Sequence
  Representative cyclic modulating agent based on desmocollin-2 cell adhesion recognition sequence
KAFATE

SEQ ID NO: 5065 - protein, 7 aa, Artificial Sequence
  Representative cyclic modulating agent based on desmocollin-2 cell adhesion recognition sequence
KAFATTE

SEQ ID NO: 5066 - protein, 8 aa, Artificial Sequence
  Representative cyclic modulating agent based on desmocollin-2 cell adhesion recognition sequence
KAFATTPE

SEQ ID NO: 5067 - protein, 9 aa, Artificial Sequence
  Representative cyclic modulating agent based on desmocollin-2 cell adhesion recognition sequence
KAFATTPDE

SEQ ID NO: 5068 - protein, 10 aa, Artificial Sequence
  Representative cyclic modulating agent based on desmocollin-2 cell adhesion recognition sequence
KAFATTPDGE

SEQ ID NO: 5069 - protein, 7 aa, Artificial Sequence
  Representative cyclic modulating agent based on desmocollin-2 cell adhesion recognition sequence
KIAFATE

SEQ ID NO: 5070 - protein, 8 aa, Artificial Sequence
  Representative cyclic modulating agent based on desmocollin-2 cell adhesion recognition sequence
KIAFATTE

SEQ ID NO: 5071 - protein, 9 aa, Artificial Sequence
  Representative cyclic modulating agent based on desmocollin-2 cell adhesion recognition sequence
KIAFATTPE

SEQ ID NO: 5072 - protein, 10 aa, Artificial Sequence
  Representative cyclic modulating agent based on desmocollin-2 cell adhesion recognition sequence
KIAFATTPDE

SEQ ID NO: 5073 - protein, 11 aa, Artificial Sequence
  Representative cyclic modulating agent based on desmocollin-2 cell adhesion recognition sequence
KIAFATTPDGE

SEQ ID NO: 5074 - protein, 8 aa, Artificial Sequence
  Representative cyclic modulating agent based on desmocollin-2 cell adhesion recognition sequence
KIIAFATE

SEQ ID NO: 5075 - protein, 9 aa, Artificial Sequence
  Representative cyclic modulating agent based on desmocollin-2 cell adhesion recognition sequence
KIIAFATTE

SEQ ID NO: 5076 - protein, 10 aa, Artificial Sequence
  Representative cyclic modulating agent based on desmocollin-2 cell adhesion recognition sequence
KIIAFATTPE

SEQ ID NO: 5077 - protein, 11 aa, Artificial Sequence
  Representative cyclic modulating agent based on desmocollin-2 cell adhesion recognition sequence
KIIAFATTPDE

SEQ ID NO: 5078 - protein, 12 aa, Artificial Sequence
  Representative cyclic modulating agent based on desmocollin-2 cell adhesion recognition sequence
KIIAFATTPDGE

SEQ ID NO: 5079 - protein, 8 aa, Artificial Sequence
  Representative cyclic modulating agent based on desmocollin-2 cell adhesion recognition sequence
KLIAFATE

SEQ ID NO: 5080 - protein, 9 aa, Artificial Sequence
  Representative cyclic modulating agent based on desmocollin-2 cell adhesion recognition sequence
KLIAFATTE

SEQ ID NO: 5081 - protein, 10 aa, Artificial Sequence
  Representative cyclic modulating agent based on desmocollin-2 cell adhesion recognition sequence
KLIAFATTPE

SEQ ID NO: 5082 - protein, 11 aa, Artificial Sequence
  Representative cyclic modulating agent based on desmocollin-2 cell adhesion recognition sequence
KLIAFATTPDE

SEQ ID NO: 5083 - protein, 12 aa, Artificial Sequence
  Representative cyclic modulating agent based on desmocollin-2 cell adhesion recognition sequence
KLIAFATTPDGE

SEQ ID NO: 5084 - protein, 5 aa, Artificial Sequence
  Representative cyclic modulating agent based on desmocollin-2 cell adhesion recognition sequence
DFATK

SEQ ID NO: 5085 - protein, 6 aa, Artificial Sequence
  Representative cyclic modulating agent based on desmocollin-2 cell adhesion recognition sequence
DFATTK

SEQ ID NO: 5086 - protein, 7 aa, Artificial Sequence
  Representative cyclic modulating agent based on desmocollin-2 cell adhesion recognition sequence
DFATTPK

SEQ ID NO: 5087 - protein, 8 aa, Artificial Sequence
  Representative cyclic modulating agent based on desmocollin-2 cell adhesion recognition sequence
DFATTPDK

SEQ ID NO: 5088 - protein, 9 aa, Artificial Sequence
  Representative cyclic modulating agent based on desmocollin-2 cell adhesion recognition sequence
DFATTPDGK

SEQ ID NO: 5089 - protein, 6 aa, Artificial Sequence
  Representative cyclic modulating agent based on desmocollin-2 cell adhesion recognition sequence
DAFATK

SEQ ID NO: 5090 - protein, 7 aa, Artificial Sequence
  Representative cyclic modulating agent based on desmocollin-2 cell adhesion recognition sequence
DAFATTK

SEQ ID NO: 5091 - protein, 8 aa, Artificial Sequence
  Representative cyclic modulating agent based on desmocollin-2 cell adhesion recognition sequence
DAFATTPK

SEQ ID NO: 5092 - protein, 9 aa, Artificial Sequence
  Representative cyclic modulating agent based on desmocollin-2 cell adhesion recognition sequence
DAFATTPDK

SEQ ID NO: 5093 - protein, 10 aa, Artificial Sequence
  Representative cyclic modulating agent based on desmocollin-2 cell adhesion recognition sequence
DAFATTPDGK

SEQ ID NO: 5094 - protein, 7 aa, Artificial Sequence
  Representative cyclic modulating agent based on desmocollin-2 cell adhesion recognition sequence
DIAFATK

SEQ ID NO: 5095 - protein, 8 aa, Artificial Sequence
  Representative cyclic modulating agent based on desmocollin-2 cell adhesion recognition sequence
DIAFATTK

SEQ ID NO: 5096 - protein, 9 aa, Artificial Sequence
  Representative cyclic modulating agent based on desmocollin-2 cell adhesion recognition sequence
DIAFATTPK

SEQ ID NO: 5097 - protein, 10 aa, Artificial Sequence
  Representative cyclic modulating agent based on desmocollin-2 cell adhesion recognition sequence
DIAFATTPDK

SEQ ID NO: 5098 - protein, 11 aa, Artificial Sequence
  Representative cyclic modulating agent based on desmocollin-2 cell adhesion recognition sequence
DIAFATTPDGK

SEQ ID NO: 5099 - protein, 8 aa, Artificial Sequence
  Representative cyclic modulating agent based on desmocollin-2 cell adhesion recognition sequence
DIIAFATK

SEQ ID NO: 5100 - protein, 9 aa, Artificial Sequence
  Representative cyclic modulating agent based on desmocollin-2 cell adhesion recognition sequence
DIIAFATTK

SEQ ID NO: 5101 - protein, 10 aa, Artificial Sequence
  Representative cyclic modulating agent based on desmocollin-2 cell adhesion recognition sequence
DIIAFATTPK

SEQ ID NO: 5102 - protein, 11 aa, Artificial Sequence
  Representative cyclic modulating agent based on desmocollin-2 cell adhesion recognition sequence
DIIAFATTPDK

SEQ ID NO: 5103 - protein, 12 aa, Artificial Sequence
  Representative cyclic modulating agent based on desmocollin-2 cell adhesion recognition sequence
DIIAFATTPDGK

SEQ ID NO: 5104 - protein, 8 aa, Artificial Sequence
  Representative cyclic modulating agent based on desmocollin-2 cell adhesion recognition sequence
DLIAFATK

SEQ ID NO: 5105 - protein, 9 aa, Artificial Sequence
  Representative cyclic modulating agent based on desmocollin-2 cell adhesion recognition sequence
DLIAFATTK

SEQ ID NO: 5106 - protein, 10 aa, Artificial Sequence
  Representative cyclic modulating agent based on desmocollin-2 cell adhesion recognition sequence
DLIAFATTPK

SEQ ID NO: 5107 - protein, 11 aa, Artificial Sequence
  Representative cyclic modulating agent based on desmocollin-2 cell adhesion recognition sequence
DLIAFATTPDK

SEQ ID NO: 5108 - protein, 12 aa, Artificial Sequence
  Representative cyclic modulating agent based on desmocollin-2 cell adhesion recognition sequence
DLIAFATTPDGK

SEQ ID NO: 5109 - protein, 5 aa, Artificial Sequence
  Representative cyclic modulating agent based on desmocollin-2 cell adhesion recognition sequence
KFATD

SEQ ID NO: 5110 - protein, 6 aa, Artificial Sequence
  Representative cyclic modulating agent based on desmocollin-2 cell adhesion recognition sequence
KFATTD

SEQ ID NO: 5111 - protein, 7 aa, Artificial Sequence
  Representative cyclic modulating agent based on desmocollin-2 cell adhesion recognition sequence
KFATTPD

SEQ ID NO: 5112 - protein, 8 aa, Artificial Sequence
  Representative cyclic modulating agent based on desmocollin-2 cell adhesion recognition sequence
KFATTPDD

SEQ ID NO: 5113 - protein, 9 aa, Artificial Sequence
  Representative cyclic modulating agent based on desmocollin-2 cell adhesion recognition sequence
KFATTPDGD

SEQ ID NO: 5114 - protein, 6 aa, Artificial Sequence
  Representative cyclic modulating agent based on desmocollin-2 cell adhesion recognition sequence
KAFATD

SEQ ID NO: 5115 - protein, 7 aa, Artificial Sequence
  Representative cyclic modulating agent based on desmocollin-2 cell adhesion recognition sequence
KAFATTD

SEQ ID NO: 5116 - protein, 8 aa, Artificial Sequence
  Representative cyclic modulating agent based on desmocollin-2 cell adhesion recognition sequence
KAFATTPD

SEQ ID NO: 5117 - protein, 9 aa, Artificial Sequence
  Representative cyclic modulating agent based on desmocollin-2 cell adhesion recognition sequence
KAFATTPDD

SEQ ID NO: 5118 - protein, 10 aa, Artificial Sequence
  Representative cyclic modulating agent based on desmocollin-2 cell adhesion recognition sequence
KAFATTPDGD

SEQ ID NO: 5119 - protein, 7 aa, Artificial Sequence
  Representative cyclic modulating agent based on desmocollin-2 cell adhesion recognition sequence
KIAFATD

SEQ ID NO: 5120 - protein, 8 aa, Artificial Sequence
  Representative cyclic modulating agent based on desmocollin-2 cell adhesion recognition sequence
KIAFATTD

SEQ ID NO: 5121 - protein, 9 aa, Artificial Sequence
  Representative cyclic modulating agent based on desmocollin-2 cell adhesion recognition sequence
KIAFATTPD

SEQ ID NO: 5122 - protein, 10 aa, Artificial Sequence
  Representative cyclic modulating agent based on desmocollin-2 cell adhesion recognition sequence
KIAFATTPDD

SEQ ID NO: 5123 - protein, 11 aa, Artificial Sequence
  Representative cyclic modulating agent based on desmocollin-2 cell adhesion recognition sequence
KIAFATTPDGD

SEQ ID NO: 5124 - protein, 8 aa, Artificial Sequence
  Representative cyclic modulating agent based on desmocollin-2 cell adhesion recognition sequence
KIIAFATD

SEQ ID NO: 5125 - protein, 9 aa, Artificial Sequence
  Representative cyclic modulating agent based on desmocollin-2 cell adhesion recognition sequence
KIIAFATTD

SEQ ID NO: 5126 - protein, 10 aa, Artificial Sequence
  Representative cyclic modulating agent based on desmocollin-2 cell adhesion recognition sequence
KIIAFATTPD

SEQ ID NO: 5127 - protein, 11 aa, Artificial Sequence
  Representative cyclic modulating agent based on desmocollin-2 cell adhesion recognition sequence
KIIAFATTPDD

SEQ ID NO: 5128 - protein, 12 aa, Artificial Sequence
  Representative cyclic modulating agent based on desmocollin-2 cell adhesion recognition sequence
KIIAFATTPDGD

SEQ ID NO: 5129 - protein, 8 aa, Artificial Sequence
  Representative cyclic modulating agent based on desmocollin-2 cell adhesion recognition sequence
KLIAFATD

SEQ ID NO: 5130 - protein, 9 aa, Artificial Sequence
  Representative cyclic modulating agent based on desmocollin-2 cell adhesion recognition sequence
KLIAFATTD

SEQ ID NO: 5131 - protein, 10 aa, Artificial Sequence
  Representative cyclic modulating agent based on desmocollin-2 cell adhesion recognition sequence
KLIAFATTPD

SEQ ID NO: 5132 - protein, 11 aa, Artificial Sequence
  Representative cyclic modulating agent based on desmocollin-2 cell adhesion recognition sequence
KLIAFATTPDD

SEQ ID NO: 5133 - protein, 12 aa, Artificial Sequence
  Representative cyclic modulating agent based on desmocollin-2 cell adhesion recognition sequence
KLIAFATTPDGD

SEQ ID NO: 5134 - protein, 5 aa, Artificial Sequence
  Representative cyclic modulating agent based on desmocollin-2 cell adhesion recognition sequence
FATTP

SEQ ID NO: 5135 - protein, 6 aa, Artificial Sequence
  Representative cyclic modulating agent based on desmocollin-2 cell adhesion recognition sequence
FATTPD

SEQ ID NO: 5136 - protein, 7 aa, Artificial Sequence
  Representative cyclic modulating agent based on desmocollin-2 cell adhesion recognition sequence
FATTPDG

SEQ ID NO: 5137 - protein, 5 aa, Artificial Sequence
  Representative cyclic modulating agent based on desmocollin-2 cell adhesion recognition sequence
AFATT

SEQ ID NO: 5138 - protein, 6 aa, Artificial Sequence
  Representative cyclic modulating agent based on desmocollin-2 cell adhesion recognition sequence
AFATTP

SEQ ID NO: 5139 - protein, 7 aa, Artificial Sequence
  Representative cyclic modulating agent based on desmocollin-2 cell adhesion recognition sequence
AFATTPD

SEQ ID NO: 5140 - protein, 8 aa, Artificial Sequence
  Representative cyclic modulating agent based on desmocollin-2 cell adhesion recognition sequence
AFATTPDG

SEQ ID NO: 5141 - protein, 5 aa, Artificial Sequence
  Representative cyclic modulating agent based on desmocollin-2 cell adhesion recognition sequence
IAFAT

SEQ ID NO: 5142 - protein, 6 aa, Artificial Sequence
  Representative cyclic modulating agent based on desmocollin-2 cell adhesion recognition sequence
IAFATT

SEQ ID NO: 5143 - protein, 7 aa, Artificial Sequence
  Representative cyclic modulating agent based on desmocollin-2 cell adhesion recognition sequence
IAFATTP

SEQ ID NO: 5144 - protein, 8 aa, Artificial Sequence
  Representative cyclic modulating agent based on desmocollin-2 cell adhesion recognition sequence
IAFATTPD

SEQ ID NO: 5145 - protein, 9 aa, Artificial Sequence
  Representative cyclic modulating agent based on desmocollin-2 cell adhesion recognition sequence
IAFATTPDG

SEQ ID NO: 5146 - protein, 6 aa, Artificial Sequence
  Representative cyclic modulating agent based on desmocollin-2 cell adhesion recognition sequence
IIAFAT

SEQ ID NO: 5147 - protein, 7 aa, Artificial Sequence
  Representative cyclic modulating agent based on desmocollin-2 cell adhesion recognition sequence
IIAFATT

SEQ ID NO: 5148 - protein, 8 aa, Artificial Sequence
  Representative cyclic modulating agent based on desmocollin-2 cell adhesion recognition sequence
IIAFATTP

SEQ ID NO: 5149 - protein, 9 aa, Artificial Sequence
  Representative cyclic modulating agent based on desmocollin-2 cell adhesion recognition sequence
IIAFATTPD

SEQ ID NO: 5150 - protein, 10 aa, Artificial Sequence
  Representative cyclic modulating agent based on desmocollin-2 cell adhesion recognition sequence
IIAFATTPDG

SEQ ID NO: 5151 - protein, 6 aa, Artificial Sequence
  Representative cyclic modulating agent based on desmocollin-2 cell adhesion recognition sequence
LIAFAT

SEQ ID NO: 5152 - protein, 7 aa, Artificial Sequence
  Representative cyclic modulating agent based on desmocollin-2 cell adhesion recognition sequence
LIAFATT

SEQ ID NO: 5153 - protein, 8 aa, Artificial Sequence
  Representative cyclic modulating agent based on desmocollin-2 cell adhesion recognition sequence
LIAFATTP

SEQ ID NO: 5154 - protein, 9 aa, Artificial Sequence
  Representative cyclic modulating agent based on desmocollin-2 cell adhesion recognition sequence
LIAFATTPD

SEQ ID NO: 5155 - protein, 10 aa, Artificial Sequence
  Representative cyclic modulating agent based on desmocollin-2 cell adhesion recognition sequence
LIAFATTPDG

SEQ ID NO: 5156 - protein, 5 aa, Artificial Sequence
  Representative cyclic modulating agent based on desmocollin-3 cell adhesion recognition sequence
CYASC

SEQ ID NO: 5157 - protein, 6 aa, Artificial Sequence
  Representative cyclic modulating agent based on desmocollin-3 cell adhesion recognition sequence
CYASTC

SEQ ID NO: 5158 - protein, 7 aa, Artificial Sequence
  Representative cyclic modulating agent based on desmocollin-3 cell adhesion recognition sequence
CYASTAC

SEQ ID NO: 5159 - protein, 8 aa, Artificial Sequence
  Representative cyclic modulating agent based on desmocollin-3 cell adhesion recognition sequence
CYASTADC

SEQ ID NO: 5160 - protein, 9 aa, Artificial Sequence
  Representative cyclic modulating agent based on desmocollin-3 cell adhesion recognition sequence
CYASTADGC

SEQ ID NO: 5161 - protein, 6 aa, Artificial Sequence
  Representative cyclic modulating agent based on desmocollin-3 cell adhesion recognition sequence
CAYASC

SEQ ID NO: 5162 - protein, 7 aa, Artificial Sequence
  Representative cyclic modulating agent based on desmocollin-3 cell adhesion recognition sequence
CAYASTC

SEQ ID NO: 5163 - protein, 8 aa, Artificial Sequence
  Representative cyclic modulating agent based on desmocollin-3 cell adhesion recognition sequence
CAYASTAC

SEQ ID NO: 5164 - protein, 9 aa, Artificial Sequence
  Representative cyclic modulating agent based on desmocollin-3 cell adhesion recognition sequence
CAYASTADC

SEQ ID NO: 5165 - protein, 10 aa, Artificial Sequence
  Representative cyclic modulating agent based on desmocollin-3 cell adhesion recognition sequence
CAYASTADGC

SEQ ID NO: 5166 - protein, 7 aa, Artificial Sequence
  Representative cyclic modulating agent based on desmocollin-3 cell adhesion recognition sequence
CIAYASC

SEQ ID NO: 5167 - protein, 8 aa, Artificial Sequence
  Representative cyclic modulating agent based on desmocollin-3 cell adhesion recognition sequence
CIAYASTC

SEQ ID NO: 5168 - protein, 9 aa, Artificial Sequence
  Representative cyclic modulating agent based on desmocollin-3 cell adhesion recognition sequence
CIAYASTAC

SEQ ID NO: 5169 - protein, 10 aa, Artificial Sequence
  Representative cyclic modulating agent based on desmocollin-3 cell adhesion recognition sequence
CIAYASTADC

SEQ ID NO: 5170 - protein, 11 aa, Artificial Sequence
  Representative cyclic modulating agent based on desmocollin-3 cell adhesion recognition sequence
CIAYASTADGC

SEQ ID NO: 5171 - protein, 8 aa, Artificial Sequence
  Representative cyclic modulating agent based on desmocollin-3 cell adhesion recognition sequence
CLIAYASC

SEQ ID NO: 5172 - protein, 9 aa, Artificial Sequence
  Representative cyclic modulating agent based on desmocollin-3 cell adhesion recognition sequence
CLIAYASTC

SEQ ID NO: 5173 - protein, 10 aa, Artificial Sequence
  Representative cyclic modulating agent based on desmocollin-3 cell adhesion recognition sequence
CLIAYASTAC

SEQ ID NO: 5174 - protein, 11 aa, Artificial Sequence
  Representative cyclic modulating agent based on desmocollin-3 cell adhesion recognition sequence
CLIAYASTADC

SEQ ID NO: 5175 - protein, 12 aa, Artificial Sequence
  Representative cyclic modulating agent based on desmocollin-3 cell adhesion recognition sequence
CLIAYASTADGC

SEQ ID NO: 5176 - protein, 5 aa, Artificial Sequence
  Representative cyclic modulating agent based on desmocollin-3 cell adhesion recognition sequence
EYASK

SEQ ID NO: 5177 - protein, 6 aa, Artificial Sequence
  Representative cyclic modulating agent based on desmocollin-3 cell adhesion recognition sequence
EYASTK

SEQ ID NO: 5178 - protein, 7 aa, Artificial Sequence
  Representative cyclic modulating agent based on desmocollin-3 cell adhesion recognition sequence
EYASTAK

SEQ ID NO: 5179 - protein, 8 aa, Artificial Sequence
  Representative cyclic modulating agent based on desmocollin-3 cell adhesion recognition sequence
EYASTADK

SEQ ID NO: 5180 - protein, 9 aa, Artificial Sequence
  Representative cyclic modulating agent based on desmocollin-3 cell adhesion recognition sequence
EYASTADGK

SEQ ID NO: 5181 - protein, 6 aa, Artificial Sequence
  Representative cyclic modulating agent based on desmocollin-3 cell adhesion recognition sequence
EAYASK

SEQ ID NO: 5182 - protein, 7 aa, Artificial Sequence
  Representative cyclic modulating agent based on desmocollin-3 cell adhesion recognition sequence
EAYASTK

SEQ ID NO: 5183 - protein, 8 aa, Artificial Sequence
  Representative cyclic modulating agent based on desmocollin-3 cell adhesion recognition sequence
EAYASTAK

SEQ ID NO: 5184 - protein, 9 aa, Artificial Sequence
  Representative cyclic modulating agent based on desmocollin-3 cell adhesion recognition sequence
EAYASTADK

SEQ ID NO: 5185 - protein, 10 aa, Artificial Sequence
  Representative cyclic modulating agent based on desmocollin-3 cell adhesion recognition sequence
EAYASTADGK

SEQ ID NO: 5186 - protein, 7 aa, Artificial Sequence
  Representative cyclic modulating agent based on desmocollin-3 cell adhesion recognition sequence
EIAYASK

SEQ ID NO: 5187 - protein, 8 aa, Artificial Sequence
  Representative cyclic modulating agent based on desmocollin-3 cell adhesion recognition sequence
EIAYASTK

SEQ ID NO: 5188 - protein, 9 aa, Artificial Sequence
  Representative cyclic modulating agent based on desmocollin-3 cell adhesion recognition sequence
EIAYASTAK

SEQ ID NO: 5189 - protein, 10 aa, Artificial Sequence
  Representative cyclic modulating agent based on desmocollin-3 cell adhesion recognition sequence
EIAYASTADK

SEQ ID NO: 5190 - protein, 11 aa, Artificial Sequence
  Representative cyclic modulating agent based on desmocollin-3 cell adhesion recognition sequence
EIAYASTADGK

SEQ ID NO: 5191 - protein, 8 aa, Artificial Sequence
  Representative cyclic modulating agent based on desmocollin-3 cell adhesion recognition sequence
ELIAYASK

SEQ ID NO: 5192 - protein, 9 aa, Artificial Sequence
  Representative cyclic modulating agent based on desmocollin-3 cell adhesion recognition sequence
ELIAYASTK

SEQ ID NO: 5193 - protein, 10 aa, Artificial Sequence
  Representative cyclic modulating agent based on desmocollin-3 cell adhesion recognition sequence
ELIAYASTAK

SEQ ID NO: 5194 - protein, 11 aa, Artificial Sequence
  Representative cyclic modulating agent based on desmocollin-3 cell adhesion recognition sequence
ELIAYASTADK

SEQ ID NO: 5195 - protein, 12 aa, Artificial Sequence
  Representative cyclic modulating agent based on desmocollin-3 cell adhesion recognition sequence
ELIAYASTADGK

SEQ ID NO: 5196 - protein, 5 aa, Artificial Sequence
  Representative cyclic modulating agent based on desmocollin-3 cell adhesion recognition sequence
KYASE

SEQ ID NO: 5197 - protein, 6 aa, Artificial Sequence
  Representative cyclic modulating agent based on desmocollin-3 cell adhesion recognition sequence
KYASTE

SEQ ID NO: 5198 - protein, 7 aa, Artificial Sequence
  Representative cyclic modulating agent based on desmocollin-3 cell adhesion recognition sequence
KYASTAE

SEQ ID NO: 5199 - protein, 8 aa, Artificial Sequence
  Representative cyclic modulating agent based on desmocollin-3 cell adhesion recognition sequence
KYASTADE

SEQ ID NO: 5200 - protein, 9 aa, Artificial Sequence
  Representative cyclic modulating agent based on desmocollin-3 cell adhesion recognition sequence
KYASTADGE

SEQ ID NO: 5201 - protein, 6 aa, Artificial Sequence
  Representative cyclic modulating agent based on desmocollin-3 cell adhesion recognition sequence
KAYASE

SEQ ID NO: 5202 - protein, 7 aa, Artificial Sequence
  Representative cyclic modulating agent based on desmocollin-3 cell adhesion recognition sequence
KAYASTE

SEQ ID NO: 5203 - protein, 8 aa, Artificial Sequence
  Representative cyclic modulating agent based on desmocollin-3 cell adhesion recognition sequence
KAYASTAE

SEQ ID NO: 5204 - protein, 9 aa, Artificial Sequence
  Representative cyclic modulating agent based on desmocollin-3 cell adhesion recognition sequence
KAYASTADE

SEQ ID NO: 5205 - protein, 10 aa, Artificial Sequence
  Representative cyclic modulating agent based on desmocollin-3 cell adhesion recognition sequence
KAYASTADGE

SEQ ID NO: 5206 - protein, 7 aa, Artificial Sequence
  Representative cyclic modulating agent based on desmocollin-3 cell adhesion recognition sequence
KIAYASE

SEQ ID NO: 5207 - protein, 8 aa, Artificial Sequence
  Representative cyclic modulating agent based on desmocollin-3 cell adhesion recognition sequence
KIAYASTE

SEQ ID NO: 5208 - protein, 9 aa, Artificial Sequence
  Representative cyclic modulating agent based on desmocollin-3 cell adhesion recognition sequence
KIAYASTAE

SEQ ID NO: 5209 - protein, 10 aa, Artificial Sequence
  Representative cyclic modulating agent based on desmocollin-3 cell adhesion recognition sequence
KIAYASTADE

SEQ ID NO: 5210 - protein, 11 aa, Artificial Sequence
  Representative cyclic modulating agent based on desmocollin-3 cell adhesion recognition sequence
KIAYASTADGE

SEQ ID NO: 5211 - protein, 8 aa, Artificial Sequence
  Representative cyclic modulating agent based on desmocollin-3 cell adhesion recognition sequence
KLIAYASE

SEQ ID NO: 5212 - protein, 9 aa, Artificial Sequence
  Representative cyclic modulating agent based on desmocollin-3 cell adhesion recognition sequence
KLIAYASTE

SEQ ID NO: 5213 - protein, 10 aa, Artificial Sequence
  Representative cyclic modulating agent based on desmocollin-3 cell adhesion recognition sequence
KLIAYASTAE

SEQ ID NO: 5214 - protein, 11 aa, Artificial Sequence
  Representative cyclic modulating agent based on desmocollin-3 cell adhesion recognition sequence
KLIAYASTADE

SEQ ID NO: 5215 - protein, 12 aa, Artificial Sequence
  Representative cyclic modulating agent based on desmocollin-3 cell adhesion recognition sequence
KLIAYASTADGE

SEQ ID NO: 5216 - protein, 5 aa, Artificial Sequence
  Representative cyclic modulating agent based on desmocollin-3 cell adhesion recognition sequence
DYASK

SEQ ID NO: 5217 - protein, 6 aa, Artificial Sequence
  Representative cyclic modulating agent based on desmocollin-3 cell adhesion recognition sequence
DYASTK

SEQ ID NO: 5218 - protein, 7 aa, Artificial Sequence
  Representative cyclic modulating agent based on desmocollin-3 cell adhesion recognition sequence
DYASTAK

SEQ ID NO: 5219 - protein, 8 aa, Artificial Sequence
  Representative cyclic modulating agent based on desmocollin-3 cell adhesion recognition sequence
DYASTADK

SEQ ID NO: 5220 - protein, 9 aa, Artificial Sequence
  Representative cyclic modulating agent based on desmocollin-3 cell adhesion recognition sequence
DYASTADGK

SEQ ID NO: 5221 - protein, 6 aa, Artificial Sequence
  Representative cyclic modulating agent based on desmocollin-3 cell adhesion recognition sequence
DAYASK

SEQ ID NO: 5222 - protein, 7 aa, Artificial Sequence
  Representative cyclic modulating agent based on desmocollin-3 cell adhesion recognition sequence
DAYASTK

SEQ ID NO: 5223 - protein, 8 aa, Artificial Sequence
  Representative cyclic modulating agent based on desmocollin-3 cell adhesion recognition sequence
DAYASTAK

SEQ ID NO: 5224 - protein, 9 aa, Artificial Sequence
  Representative cyclic modulating agent based on desmocollin-3 cell adhesion recognition sequence
DAYASTADK

SEQ ID NO: 5225 - protein, 10 aa, Artificial Sequence
  Representative cyclic modulating agent based on desmocollin-3 cell adhesion recognition sequence
DAYASTADGK

SEQ ID NO: 5226 - protein, 7 aa, Artificial Sequence
  Representative cyclic modulating agent based on desmocollin-3 cell adhesion recognition sequence
DIAYASK

SEQ ID NO: 5227 - protein, 8 aa, Artificial Sequence
  Representative cyclic modulating agent based on desmocollin-3 cell adhesion recognition sequence
DIAYASTK

SEQ ID NO: 5228 - protein, 9 aa, Artificial Sequence
  Representative cyclic modulating agent based on desmocollin-3 cell adhesion recognition sequence
DIAYASTAK

SEQ ID NO: 5229 - protein, 10 aa, Artificial Sequence
  Representative cyclic modulating agent based on desmocollin-3 cell adhesion recognition sequence
DIAYASTADK

SEQ ID NO: 5230 - protein, 11 aa, Artificial Sequence
  Representative cyclic modulating agent based on desmocollin-3 cell adhesion recognition sequence
DIAYASTADGK

SEQ ID NO: 5231 - protein, 8 aa, Artificial Sequence
  Representative cyclic modulating agent based on desmocollin-3 cell adhesion recognition sequence
DLIAYASK

SEQ ID NO: 5232 - protein, 9 aa, Artificial Sequence
  Representative cyclic modulating agent based on desmocollin-3 cell adhesion recognition sequence
DLIAYASTK

SEQ ID NO: 5233 - protein, 10 aa, Artificial Sequence
  Representative cyclic modulating agent based on desmocollin-3 cell adhesion recognition sequence
DLIAYASTAK

SEQ ID NO: 5234 - protein, 11 aa, Artificial Sequence
  Representative cyclic modulating agent based on desmocollin-3 cell adhesion recognition sequence
DLIAYASTADK

SEQ ID NO: 5235 - protein, 12 aa, Artificial Sequence
  Representative cyclic modulating agent based on desmocollin-3 cell adhesion recognition sequence
DLIAYASTADGK

SEQ ID NO: 5236 - protein, 5 aa, Artificial Sequence
  Representative cyclic modulating agent based on desmocollin-3 cell adhesion recognition sequence
KYASD

SEQ ID NO: 5237 - protein, 6 aa, Artificial Sequence
  Representative cyclic modulating agent based on desmocollin-3 cell adhesion recognition sequence
KYASTD

SEQ ID NO: 5238 - protein, 7 aa, Artificial Sequence
  Representative cyclic modulating agent based on desmocollin-3 cell adhesion recognition sequence
KYASTAD

SEQ ID NO: 5239 - protein, 8 aa, Artificial Sequence
  Representative cyclic modulating agent based on desmocollin-3 cell adhesion recognition sequence
KYASTADD

SEQ ID NO: 5240 - protein, 9 aa, Artificial Sequence
  Representative cyclic modulating agent based on desmocollin-3 cell adhesion recognition sequence
KYASTADGD

SEQ ID NO: 5241 - protein, 6 aa, Artificial Sequence
  Representative cyclic modulating agent based on desmocollin-3 cell adhesion recognition sequence
KAYASD

SEQ ID NO: 5242 - protein, 7 aa, Artificial Sequence
  Representative cyclic modulating agent based on desmocollin-3 cell adhesion recognition sequence
KAYASTD

SEQ ID NO: 5243 - protein, 8 aa, Artificial Sequence
  Representative cyclic modulating agent based on desmocollin-3 cell adhesion recognition sequence
KAYASTAD

SEQ ID NO: 5244 - protein, 9 aa, Artificial Sequence
  Representative cyclic modulating agent based on desmocollin-3 cell adhesion recognition sequence
KAYASTADD

SEQ ID NO: 5245 - protein, 10 aa, Artificial Sequence
  Representative cyclic modulating agent based on desmocollin-3 cell adhesion recognition sequence
KAYASTADGD

SEQ ID NO: 5246 - protein, 7 aa, Artificial Sequence
  Representative cyclic modulating agent based on desmocollin-3 cell adhesion recognition sequence
KIAYASD

SEQ ID NO: 5247 - protein, 8 aa, Artificial Sequence
  Representative cyclic modulating agent based on desmocollin-3 cell adhesion recognition sequence
KIAYASTD

SEQ ID NO: 5248 - protein, 9 aa, Artificial Sequence
  Representative cyclic modulating agent based on desmocollin-3 cell adhesion recognition sequence
KIAYASTAD

SEQ ID NO: 5249 - protein, 10 aa, Artificial Sequence
  Representative cyclic modulating agent based on desmocollin-3 cell adhesion recognition sequence
KIAYASTADD

SEQ ID NO: 5250 - protein, 11 aa, Artificial Sequence
  Representative cyclic modulating agent based on desmocollin-3 cell adhesion recognition sequence
KIAYASTADGD

SEQ ID NO: 5251 - protein, 8 aa, Artificial Sequence
  Representative cyclic modulating agent based on desmocollin-3 cell adhesion recognition sequence
KLIAYASD

SEQ ID NO: 5252 - protein, 9 aa, Artificial Sequence
  Representative cyclic modulating agent based on desmocollin-3 cell adhesion recognition sequence
KLIAYASTD

SEQ ID NO: 5253 - protein, 10 aa, Artificial Sequence
  Representative cyclic modulating agent based on desmocollin-3 cell adhesion recognition sequence
KLIAYASTAD

SEQ ID NO: 5254 - protein, 11 aa, Artificial Sequence
  Representative cyclic modulating agent based on desmocollin-3 cell adhesion recognition sequence
KLIAYASTADD

SEQ ID NO: 5255 - protein, 12 aa, Artificial Sequence
  Representative cyclic modulating agent based on desmocollin-3 cell adhesion recognition sequence
KLIAYASTADGD

SEQ ID NO: 5256 - protein, 5 aa, Artificial Sequence
  Representative cyclic modulating agent based on desmocollin-3 cell adhesion recognition sequence
YASTA

SEQ ID NO: 5257 - protein, 6 aa, Artificial Sequence
  Representative cyclic modulating agent based on desmocollin-3 cell adhesion recognition sequence
YASTAD

SEQ ID NO: 5258 - protein, 7 aa, Artificial Sequence
  Representative cyclic modulating agent based on desmocollin-3 cell adhesion recognition sequence
YASTADG

SEQ ID NO: 5259 - protein, 5 aa, Artificial Sequence
  Representative cyclic modulating agent based on desmocollin-3 cell adhesion recognition sequence
AYAST

SEQ ID NO: 5260 - protein, 6 aa, Artificial Sequence
  Representative cyclic modulating agent based on desmocollin-3 cell adhesion recognition sequence
AYASTA

SEQ ID NO: 5261 - protein, 7 aa, Artificial Sequence
  Representative cyclic modulating agent based on desmocollin-3 cell adhesion recognition sequence
AYASTAD

SEQ ID NO: 5262 - protein, 8 aa, Artificial Sequence
  Representative cyclic modulating agent based on desmocollin-3 cell adhesion recognition sequence
AYASTADG

SEQ ID NO: 5263 - protein, 5 aa, Artificial Sequence
  Representative cyclic modulating agent based on desmocollin-3 cell adhesion recognition sequence
IAYAS

SEQ ID NO: 5264 - protein, 6 aa, Artificial Sequence
  Representative cyclic modulating agent based on desmocollin-3 cell adhesion recognition sequence
IAYAST

SEQ ID NO: 5265 - protein, 7 aa, Artificial Sequence
  Representative cyclic modulating agent based on desmocollin-3 cell adhesion recognition sequence
IAYASTA

SEQ ID NO: 5266 - protein, 8 aa, Artificial Sequence
  Representative cyclic modulating agent based on desmocollin-3 cell adhesion recognition sequence
IAYASTAD

SEQ ID NO: 5267 - protein, 9 aa, Artificial Sequence
  Representative cyclic modulating agent based on desmocollin-3 cell adhesion recognition sequence
IAYASTADG

SEQ ID NO: 5268 - protein, 6 aa, Artificial Sequence
  Representative cyclic modulating agent based on desmocollin-3 cell adhesion recognition sequence
LIAYAS

SEQ ID NO: 5269 - protein, 7 aa, Artificial Sequence
  Representative cyclic modulating agent based on desmocollin-3 cell adhesion recognition sequence
LIAYAST

SEQ ID NO: 5270 - protein, 8 aa, Artificial Sequence
  Representative cyclic modulating agent based on desmocollin-3 cell adhesion recognition sequence
LIAYASTA

SEQ ID NO: 5271 - protein, 9 aa, Artificial Sequence
  Representative cyclic modulating agent based on desmocollin-3 cell adhesion recognition sequence
LIAYASTAD

SEQ ID NO: 5272 - protein, 10 aa, Artificial Sequence
  Representative cyclic modulating agent based on desmocollin-3 cell adhesion recognition sequence
LIAYASTADG

SEQ ID NO: 5273 - DNA, 19 bp, Artificial Sequence
  OB- cadherin primer
accagatgtctgtatcaga

SEQ ID NO: 5274 - DNA, 21 bp, Artificial Sequence
  OB- cadherin primer
gtctcctggtcatcatctgca

SEQ ID NO: 5275 - DNA, 20 bp, Artificial Sequence
  OB- cadherin primer
gccagacacagttcttaagg

SEQ ID NO: 5276 - DNA, 20 bp, Artificial Sequence
  OB- cadherin primer
atcaaacctgagtatcagta

SEQ ID NO: 5277 - DNA, 25 bp, Artificial Sequence
  HPRT primer
cctgctggattacattaaagcactg

SEQ ID NO: 5278 - DNA, 25 bp, Artificial Sequence
  HPRT primer
gtcaagggcatatccaacaacaaac

SEQ ID NO: 5279 - DNA, 22 bp, Artificial Sequence
  E-cadherin forward primer
ccttcccccaacacgtcccccc

SEQ ID NO: 5280 - DNA, 20 bp, Artificial Sequence
  E-cadherin reverse primer
tctccacctccttcttcatc

SEQ ID NO: 5281 - DNA, 21 bp, Artificial Sequence
  N-cadherin forward primer
caagagcttgtcacaatcagg

SEQ ID NO: 5282 - DNA, 19 bp, Artificial Sequence
  N-cadherin reverse primer
catttggatcatccgcatc

SEQ ID NO: 5283 - protein, 10 aa, Artificial Sequence
  Representative modulating agent based on desmoglein cell adhesion recognition sequence
LTGYALDSRG

SEQ ID NO: 5284 - protein, 10 aa, Artificial Sequence
  Representative modulating agent based on desmocollin cell adhesion recognition sequence
LTAFATTPDG

SEQ ID NO: 5285 - protein, 4 aa, Unknown
  Calcium Binding Motif in Extracellular domains of Classical     Cadherins
  VARIANT 1, 3: Xaa = Any Amino Acid
XDXE

SEQ ID NO: 5286 - protein, 4 aa, UNKNOWN
  Calcium Binding Motif in Extracellular domains of Classical     Cadherins
DVNE

SEQ ID NO: 5287 - protein, 5 aa, uNKNOWN
  Calcium Binding Motif in Extracellular domains of OB-cadherins
DINDN

SEQ ID NO: 5288 - protein, 4 aa, UNKNOWN
  Calcium Binding Motif in Extracellular domains of OB-cadherins
MDRE

SEQ ID NO: 5289 - protein, 5 aa, unknown
  Calcium Binding Motif in Extracellular domains of OB-cadherins
DVNDN

SEQ ID NO: 5290 - protein, 4 aa, UNKNOWN
  Calcium Binding Motif in Extracellular domains of OB-cadherins
VDFE

SEQ ID NO: 5291 - protein, 4 aa, UNKNOWN
  Calcium Binding Motif in Extracellular domains of OB-cadherins
DADE

SEQ ID NO: 5292 - protein, 4 aa, UNKNOWN
  Calcium Binding Motif in Extracellular domains of cadherin-5
LDYE

SEQ ID NO: 5293 - protein, 4 aa, UNKNOWN
  Calcium Binding Motif in Extracellular domains of cadherin-5
DVDE

SEQ ID NO: 5294 - protein, 5 aa, UNKNOWN
  Calcium Binding Motif in Extracellular domains of cadherin-5
DENDN

SEQ ID NO: 5295 - protein, 4 aa, UNKNOWN
  Calcium Binding Motif in Extracellular domains of cadherin-6
LDFE

SEQ ID NO: 5296 - protein, 5 aa, UNKNOWN
  Calcium Binding Motif in Extracellular domains of cadherin-12
DVNDE

SEQ ID NO: 5297 - protein, 4 aa, UNKNOWN
  Calcium Binding Motif in Extracellular domains of cadherin-14
LNYE

SEQ ID NO: 5298 - protein, 5 aa, UNKNOWN
  Calcium Binding Motif in Extracellular domains of cadherin-15
DQNDN

SEQ ID NO: 5299 - protein, 4 aa, UNKNOWN
  Calcium Binding Motif in Extracellular domains of cadherin-15
DTNE

SEQ ID NO: 5300 - protein, 4 aa, UNKNOWN
  Calcium Binding Motif in Extracellular domains of cadherin-15
EVNE

SEQ ID NO: 5301 - protein, 4 aa, UNKNOWN
  Calcium Binding Motif in Extracellular domains of cadherin-15
DKND

SEQ ID NO: 5302 - protein, 4 aa, UNKNOWN
  Calcium Binding Motif in Extracellular domains of PB -cadherin
DIND

SEQ ID NO: 5303 - protein, 5 aa, UNKNOWN
  Calcium Binding Motif in Extracellular domains of LI- cadherin
DINDQ

SEQ ID NO: 5304 - protein, 5 aa, UNKNOWN
  Calcium Binding Motif in Extracellular domains of Protocadherin 43
DANDN

SEQ ID NO: 5305 - protein, 4 aa, UNKNOWN
  Calcium Binding Motif in Extracellular domains of Protocadherin 68
IDRE

SEQ ID NO: 5306 - protein, 5 aa, unknown
  Calcium Binding Motif in Extracellular domains of Protocadherin 68
DSNDN

SEQ ID NO: 5307 - protein, 5 aa, UNKNOWN
  Calcium Binding Motif in Extracellular domains of Protocadherin 68
DRNDN

SEQ ID NO: 5308 - protein, 4 aa, UNKNOWN
  Calcium Binding Motif in Extracellular domains of Protocadherin 68
FNFE

SEQ ID NO: 5309 - protein, 4 aa, UNKNOWN
  Calcium Binding Motif in Extracellular domains of Desmoglein 1
VDRE

SEQ ID NO: 5310 - protein, 4 aa, UNKNOWN
  Calcium Binding Motif in Extracellular domains of Desmoglein 2
VDYE

SEQ ID NO: 5311 - protein, 5 aa, UNKNOWN
  Calcium Binding Motif in Extracellular domains of Desmocollin-1
DDNDN

SEQ ID NO: 5312 - protein, 5 aa, UNKNOWN
  Calcium Binding Motif in Extracellular domains of Desmocollin-1
DENDN

SEQ ID NO: 5313 - protein, 5 aa, UNKNOWN
  Calcium Binding Motif in Extracellular domains of Desmocollin-1
DYNDN

SEQ ID NO: 5314 - protein, 4 aa, UNKNOWN
  Calcium Binding Motif in Extracellular domain of Cnr-1
IDFE

SEQ ID NO: 5315 - protein, 4 aa, UNKNOWN
  Calcium Binding Motif in Extracellular domain of Cnr-1
LDHE

SEQ ID NO: 5316 - protein, 5 aa, UNKNOWN
  Calcium Binding Motif in Extracellular domain of Cnr-7
DTNDN

SEQ ID NO: 5317 - protein, 108 aa, Homo sapiens
EWIKFAAACREGEDNSKRNPIAKIHSDCAANQQVTYRISGVGIDQPPYGIFVINQKTGEINITSIVDREVTPFFIIYCRALNSMGQDLERPLELRVRVLDINDNPPVF

SEQ ID NO: 5318 - protein, 108 aa, Bos torus
EWIKFAAACREGEDNSKRNPIAKIHSDCAANQQVTYRISGVGIDQPPYGIFVINQKTGEINITSIVDREVTPFFIIYCRALNSLGQDLEKPLELRVRVLDINDNPPVF

SEQ ID NO: 5319 - protein, 110 aa, Homo sapiens
AWITAPVALREGEDLSKKNPIAKIHSDLAEERGLKITYKYTGKGITEPPFGIFVFNKDTGELNVTSILDREETPFFLLTGYALDARGNNVEKPLELRIKVLDINDNEPVF

SEQ ID NO: 5320 - protein, 108 aa, Homo sapiens
EWVKFAKPCREGEDNSKRNPIAKITSDYQATQKITYRISGVGIDQPPFGIFVVDKNTGDINITAIVDREETPSFLITCRALNAQGLDVEKPLILTVKILDINDNPPVF

SEQ ID NO: 5321 - protein, 108 aa, Mus musculus
EWVKFAKPCREREDNSRRNPIAKITSDFQKNQKITYRISGVGIDQPPFGIFVVDPNNGDINITAIVDREETPSFLITCRALNALGQDVERPLILTVKILDVNDNPPIF

SEQ ID NO: 5322 - protein, 108 aa, Homo sapiens
RWAPIPASLMENSLGPFPQHVQQIQSDAAQNYTIFYSISGPGVDKEPFNLFYIEKDTGDIFCTRSIDREKYEQFALYGYATTADGYAPEYPLPLIIKIEDDNDNAPYF

SEQ ID NO: 5323 - protein, 108 aa, Mus musculus
RWAPIPCSLMENSLGPFPQHIQQIQSDAAQNYTIFYSISGPGDDKEPYNLFYIEKDTGDIYCTRSIDREQYDQFLVYGYATTADGYAPDYPLPLLFKVEDDNDNAPYF

SEQ ID NO: 5324 - protein, 108 aa, Bos torus
RWAPIPCSLMENSLGPFPQHVQQVQSDAAQNYTIFYSISGPGVDKEPFNLFFIEKDTGDIFCTRSIDREQYQEFPIYAYATTADGYAPEYPLPLVFKVEDDNDNAPYF

SEQ ID NO: 5325 - protein, 108 aa, Homo sapiens
RWAPIPCSMLENSLGPFPLFLQQVQSDTAQNYTIYYSIRGPGVDQEPRNLFYVERDTGNLYCTRPVDREQYESFEIIAFATTPDGYTPELPLPLIIKIEDENDNYPIF

SEQ ID NO: 5326 - protein, 108 aa, Canis familaris
RWAPIPCSMQENSLGPFPLFLQQIQSDTAQNYTIFYSIRGPGVDREPKNLFYVERDTGNLFCTRPVDREEYESFELIAFATTPDGYTPELPLPLVIRIEDENDNYPIF

SEQ ID NO: 5327 - protein, 108 aa, Homo sapiens
RWAPIPCSMQENSLGPFPLFLQQVESDAAQNYTVFYSISGRGVDKEPLNLFYIERDTGNLFCTRPVDREEYDVFDLIAYASTADGYSADLPLPLPIRVEDENDNHPVF

SEQ ID NO: 5328 - protein, 108 aa, Mus musculus
RWAPIPCSMQENSLGPFPLFLQQVQSDAAQNYTVFYSISGRGADQEPLNWFFIERDTGNLYCTRPVDREEYDVFDLIAYASTADGYSADLPLPLPIKIEDENDNYPLF

SEQ ID NO: 5329 - protein, 108 aa, Bos torus
RWAPIPCSMQENSLGPFPLFLQQVQSDAAQNYTIFYSISGRGVDKEPLNLFFIERDTGNLYCTQPVDREEYDVFDLIAYASTADGYSADFPLPLPIRVEDENDNHPIF

SEQ ID NO: 5330 - protein, 108 aa, Homo sapiens; identical to SEQ ID NO: 5327
